United States Patent Application Publication US 2026/0191916 A1 - sequence listing, part 15

SEQ ID NO: 16 - DNA, 2851785 bp, Alistipes putredinis (residues 1-1,425,893 of 2,851,785)
  source 1..2851785: mol_type = genomic DNA
atgttagctcccgcacagacatattgcgaaaaatggcaaacctgcttggaccagatcaagtcccgaacgaccgaagaggagttcgtgaagtggttcaaacccatcgtgccgctcgaattcgacggcaagacgctgcgtctgtgcgtacccaacatgagctacgtctatcagatcgagaaacactacattccgttcctgcggccgatcatctcccaactctacggacaggagatccgtctgcactacgccgttcccaaaaacgacgcacagagcgtgccagtgtcgaaagaagccgacacgacggcgatttcgcagttcagcacccagaccaatacggcaaatataaaaaatccgttcgtcattccgggcctcaagaagatcgtcatcgacccgcagctcaacccgaactacacgttcgcaaccttcatcgaaggggagtgcaaccgcctggcccgttcggcgggtatggccgtcgcggtcgatccgggccatacgcctttcaacccgctgtatatatacggcaactccggactgggcaagacccacatcgtgcagtcgatcggccacgaagtgcggcagcgccatcccgaactgcaggtgctttacgtttcgatgaacaagttccaggcgcaattccagaccgcctacaagaacggcgaaattccggatttcatccatttctaccagatgatcgacgtattgattatcgacgacatccaggagctcacgggaaaaaccggcacccagaacgccttcttcaacatattcaaccacttgcaactggcaggcaaacagttgatccttacctcggataaaccgcccgtggagctaaaggacatcgaacagcgactgctgacccgcttcaagtggggactttcgacccagctcaacacgcccgactacgacaccaaagtcaagatcatcagaatcaaggctcagaaactcggcctccagcttacggacgaaatcgtccgctacctggcggacaatatctccgccaacgtccgggaaatcgagggcgctctgtcggccctggtagccaataccgtttatatgggcaagaaagtttccctgtcgctcgtcaaggagattctgaaggtctatgtccgggtatgccagaaagagatcacgatcgagcacatcatcgaagtcgtctgcgacttcctgcatatcgacatccagcgcctcaattcgcccgaacgaacccgcgaagtggctcaggcgcgtcagatcgccatgtacttggccaagcagcacaccaaatccccgctgatcgccatcggttcggccatcggaggacgcaaccatgccacggtgttgcactcctgcaaggcggtatcgaaccagatcgaaacagacaaggcttttcagcgacagatggaagagctcgaaaaactggtcctggcataacccgccgggacttttttcaccccctcccgaatcacaaatttgcgaaaaacttaccgacggctcgatatttcggatgacatccaagtccgtaagcaccgttgccttccgcttgttatcactccggcaaaaccatccccgacaccggcacgcatacacttctccaatccggttgcacccggacattgaaccataccggaggcagtcgattcgccgaccatatcctccgcctccgaaaaccccggattcttcaggccgtcggcaacgaacggccctgtttccccaaaatacgacccaccccgacacgcagccgcaaatttccccttcacaccacagaattacatccgcaaacagccataaatccggccggaaatggcgataattgcattttatttcgtaattttgaaaaataaatcccgttgtgtaaaacacccggagcgaaacggcgattccgactttcaggaaccgtgtcggaagatccgtcagtcgccgggcagcgacgacagaacaacaaagttcggcaggcgggaaaatccagagtttacgtacaggacaccggatacgaaatacgaaaaaaataaaaacaattcaaccatatggcagagaaaacacaagcaaatcccgacaagttaaaggtacttaacgcggtgatggagaagatcgagaaggatttcggcaaaggctcgattatgcgcatgtcgagcgcagaggtcgccgacgtgcaggtgatccccacgggttcgatcaccctggacatggcgctcggcgtaggcggttaccccaaaggccgcgtcatcgagatttacggccccgaatcctcgggcaagacgaccctggcgatccacgccattgccgaagcccagaaggccggcggtatcgccgctttcatcgacgcggaacacgctttcgacagctcctacgcccagcaactcggcgtggatgtcgataacctgctgatttcgcagccggacaacggcgaacaggcgctcgaaatcgccgactcgctgatccgctcgagcgccatcgacatcatcgtcatcgactccgtggcggctctgacgcccaaggcggaaatcgaaggggagatgggcgatgccaagatgggattgcaggcccgcctgatgtcgcaggcgctgcgcaagctcacctcgagcatctccaaaaccaaaacggtctgcatcttcatcaaccagttgcgcgacaagatcggcgtagtgtacggcaaccccgaaaccacgacgggcggtaatgcactgaaattctatgccagcgtccgcatcgacatccgccgggtgtcggtcatcaaggacggcgaggaacagctcggcacccgcacccgcgtcaaagtggtcaaaaacaaggtggcgcccccgttcaagaaggccgaattcgacatcatgttcggcgagggcatctcgaagatcggcgaaatcatcgacctgggtgtggactacggaatcatcaagaaatcgggttcgtggttctcttacggcgaccgcaaaatcggccagggccgcgacagcgtgaaagagcttctcaagaacgatgaagcgcttcgcaacgaagtcgaagccaaagtccgcgaagcgatgattgccgcccgcaaagcataaaaagcgaatgaagagccgaccggggcctgtaacaaaggcaggaaacgcccaaaagaccggtcggagtcttctctcttcggacaaatacaggcagcgacgcacggtatagccgggacagttataaaacggcaccccggaaacgaagcgaaaaacgatattttacgatagaaaacgagatcgtcggtacgaaatccgtcgaaattcgtagttggaccctaaaacagcattggatggtatggattttacgccggaagacgaacgattaatcaaggagaagtgggaggaactgcttcagtcgtgcaccaaaatctgtaaaaacgacgaagactgggagttcatcaaacgcgcttttttcctggcgaaagaggcgcatggcggagtgcgtcgccgctcgggcgagccgtacctgctgcatcccatcgccgtagccaagatcgtcgtggacgagatcgggctcggcgtcaaatcggtcgtcgccgccctgctgcacgacgttgtggaggatacggagtacacggtcgaagatatggagcgcatcttcgggcccaagatcgccaagatggtcgatgggcttacgaagatgtcgggcgtattcaatgccgatacttcggagcaggcggagtatttccgcaaagtcctgctcacgctttcggacgacgtgcgggtgatcctgatcaaaatcgccgaccgcctgcacaacatgcgtacgctggggtcgatgcctaccaacaagcagatcaaaatcacgggtgaaacgctttacctgttcgcaccgctggcgtatcggctcggcctgtacgccatcaagagcgaactcgaagacctctgcatgaaatatcgcttcccggtacagtatgccgagctgtcggaaaaactcaaagcgaccgaagaacagcgcgaagccttcatcagcaaattcaacgccccgatcatcgaggcgctcaagcgggaccatatcaacttcgaaatttcgggacgcgtcaaaagcctttactcgatctggagcaagatgcagcgcaaacagatccccttcgaggaggtttacgacctgtttgccatccggatcgtcttccagccgctgccgttcccctcggaaaagacacagtgctggcagatattctcgactatcaccgacatctacacgccgaaaccggatcgcctgcgcgactggatttcgatgcccaaggccaacggttacgaagcgttgcactcgacagttatgggtcccgacggagtatgggtagaggtgcagatccgtacgcaacgcatggaggagatcgccgaaaggggattcgccgctcattggaaatacaaaaacgcctcgctgtcgaacaacgaggacgaactcgaccgctggctcaaaaagatacgcgatgcactgaatggtccgacggaaaacgccgtcgatttcctggataacttcaaattatcgctatacacatctgaaatagcagtatttacacccaaaggagaagctcgaaaaatgccgtacggagccactgcgctggacttcgcgtacgacatacactcgaaaatcggcaacagcgccatcggcgccaagatcaaccacaagatcgaaccgatcaccacgcagatcaacagcggcgaccagatcgaaatcatcaccgccgacaacgcacgccccaaagccgaatggctcgatatcgtcaccacgaccaaagctaagcaagcgatcaagagttttctcaaacgcgagcggcaaaacaacatcgaacggggcatgaagatgctcgaggagcgaatgcagcaactcaataccccgctcagcggtcgtgtgctgcgcaaaatcgtcccgatttacgaatccaacaacaaagaggagctttacagcaaaatcggggcggggatcgtcgatctgaaagacctggacaaggtactgaaagtcaatgccaccagcaagatactcaaattctggacgctttttatcaacaaaaaggaggacgaggagggcgacgatgccgaaaatccggaaccgaacaaggcgaaagccgaagaatcggcaacggcaagcgaaccgcaattcgtcatggccgaatgttgcaaaccaattccgggggacagcgtagtagggtataaagaccctgcgtcgaaccgtatcatcgtacataaatccgattgcaaggagctcgaccgactggccgctcaattcggacgcaatatcctcaaggacgagatcaagtggtcgcaacacaaggccatgtcgtacctatcgaccatcgaactgcgcggcatcgaccgcaccggcatactgctcgacctggcaaaaacggtcagcgaggatttcagcatcaatatccggcagatcaatatccagacgcacgacaacattttcgagggcacgatcagcctttatgtcaaggatgcggagggcctgcatgcaatcatggacaaaatccgcaagataaagggcatagacaccgtaaaacgcaatcaggattaaaccatcggcactatggacaaagatatcatccaaatactgtggagcgcactgttgatcgtcatagtcacgatcgtcccactggtcaagaagttcaaggagatgcaaagaaaagagttgcgctccgcatcggcgacacggtccgtccgtcaggcggacgcggacacatccgacccggtgtccggattccgaaaaacggccggcaagtccccaaaaactgaaaaagcggaatctccgttacgcaaccagatcggcatatcccgagcggacgccgaacagcaacctcatagccccggtatcgccgaagaattcgatgtgcgaaaagcagtcctttattcggagataatggctcccaaattcaaggaggagtagccaaagacaggcgcatacgctcatcggcatcgattcccgtatttttcggaagccaacacgatgcgaaatagaaggatgagaaagattcttctctccgaattaaattaaaagccagaaatcggttcccttcgcttattacgggacctcaaagcggcgacatagccacaaacaacgacgctatcaataaacacaatttcatatggcatccatattcacacgcatcatcaacggcgaaatcccgagctacaaggtggcggaggatgaaaattttctggcatttctcgacatcaatcctctcgagaaaggtcatacgctggtcgtccccaaaaaagagattgattatatcttcgacctggacgacgaaaccctacaagggatgatcgtcttcgccaaaaaggtggcgaaaaagatccaggctaaaatcgcctgcaagagagtggcagtagtggttttcggcctcgaagttccccatgcgcacattcacctgatcccgatggaaaacgaatacgacgtcgatttccgcaaagtcaagcccaaattcactccggaagagttcgaagaaacagccagaatgattcgggagtaggccatacggcaaaacatacaaatcattaattaccagccgggtagtgtattgattacactatccggccttattttttaacataatataatcaaaaggaaaataatgttaaaaaaacgacggagagcgaatttcaatatcccgaaattattgcaaaatccagcaaaatagggtggtgcgttacaaatgtaatcacctctttcttcttaaacttgcctaattttatccatttgtaaatacatactctgtaaacatgctgttgatattcaacaaatgtaaaatatcaagcaaaccctcgcaacagtcaaaaatcccctgcattattagaatcaaaatattgaattatcaatataaatacactataaaccatatatttatgacgatcaactaaacaaaaacaagaagaatccaattgtatttagagccgttttgcagcccacatcgaatttcataaaaatataaaagtattatatacttatcatcaataaattatataaaactacctatacaaataattcacacacaagattcgaagatatttaaccatattcgaataattacatttgtaaacattatcgacaacaattaacattttacaatcgtacaaaatagttgttttacaaaagaaaagtatttatttttgtaaaaaataccggaaatgaaggagaaattgcaacaattgatgaaaagcgaaggtttaacctccagccggatggccgagatcctcggaatccagccttcgggaatctcccacattctcgccggacggaacaaaccgggattcgatttgctgcagaagattctccggaggtttccgcgtgtcaatccggactggctgctgctcgattccgaacagatgtatcgaaccgaaaatccggaaagctcttcttcaacgagcggaacagacgctggaaacagccggactaacgtcggactgttcgggacggagccggaacagagatcgaacaccgccggctcggtcgctccatcgacacaaacgaccgagaacgacaacgaactgtcgaagcaaaccgatacggttcttcaaaccctcgccggcaatgaccggaatcccgtcgtgcgcgttattttggtctatgccgatcactcgtttgaggccctgacactgcataaaccgtaacccggcggtctattataaatcggcccaaaagcggacttcgaaaaaattcccatatttcgtttcaagcgaacggccgagaaggaggatcccatctgcgcaatcattgaaagacggcgtcgttattttccaacaaatcggctctcctcttatcaaattccgtttcaggccgttctggagcctacgacggcgtttctgcaacattatacccagtgcagcacacaacagaaactatacaaaatatatggatatgtaatttgcgttttaccggcaacccttttcattgggtcgccggttttttatgtttgttaatttgaaattaacgagaataatatttaatttagttctataaaatgggtttagaataatttatcagccccgctcaatgtgaatatactaccggcttttaatttctttttaagcggtacacgtcgggattttctaaaataaagtttgctcggcactcgacttattcgtatatttgcaaaaggcgaatttgcgtgcggacaggttacatgccgtaaaacgatgttttgttggcggccggatgtcttttcgccggatattcgaagctgccggtatcggctcgaacccgaatcgcgttcgttcccgacttttgccggcaggaagaacaagaccgataataaaaccttataagaaatgtcagagattacaaaattagaaccgaagctcgtctgggagctgttcgatgccattacgcgggtgccgcgtccctccaagaaagaggaaaagatccgggagttcctcgtggatttcgcaaaaaaacacaacatcgactatcagaccgacgaaacgagtaatgtcgtgatgcgcgtacccggtacgaaagggtatgagaaccgtccctgcgtcattcttcagtcccatatggatatggtgtgcgagaaaaattcggacacggcgttcgacttcgacaaggatcccatccgcacgaagatcgtcgatggctgggtgaaggccgaaggtacgacgctcggtgccgacgacggtatcggtatggcggcagcccttgccgcgctgctcgatcctgcattggaacacggtcccctggaggcgctgttcacggtggatgaagaaaccggtcttaccggtgctttcggattgggtaaaggaatgcttacgggccgttacctggtgaacctcgattccgaggatgaaggcgaaattttcatcggctgcgccggcggcgttgatacgctggctacgttccgttataagacggaggccgcacctgaagcccacgtctttttccgggttcgggtatccgacctttcgggcggacactccggcgacgatatcgataagggccgtatgaattccaacaaactggtcgcacggttgttgtggaacggcgcccagcgtttcggattgcgcctgagccgtttcgacggcggcaacctgcgcaatgccattccgcgcgaggcgtatgcggttttcgccgtgccgagcggttcgaaagccggcttcgaggctttctacaaggagtttgccggggaacttgcagccgaagccaagttccgggaaccgaatttcaagatcggaatcgaagaggttccggccgcatcggtgatcgatgcggcgacccagcgcaacttgctttacgcgctcgtaggactgcccaacggagtgatcgagatgtcgctggccatgccgggacttgtcgaaacatcgaccaacctcgcttcggtgaaattcgaaggggacgaccggatcgtcgtgaccacttcgcagcgctcctcggtggagagtgccaaggtctatgcgtcgcagatgatcgaatcggtgttcgctttggcgggcgccgaggtgtcgcattcggagggttatcccggctgggcgcccaatccccagtctaaactgttggaaatcacggttgccagctatgagaaacttttcggtgtgaagcccaaggtgcgtgcgatccatgccggtttggagtgcggcttgttcctcgagaaatatccgcatctggagatggtttcgttcggtccgacgctgcgcggcgtccattcgcccgacgagcggctcgaaatcgcaacgattcccaagttctgggatctgttggccgatatcctgaaaaaagtcgagtaagtttctgcgtggaatattgattcccgaatcatatcgtctggtcgatcaagtcattcatttgataatgaatgacttgattttttgattatacggatcgtaggaagatggtttacacgggtaattcgggatgatattctcgatctttttttattgtcaaaggccggatactctgtattttatgacaatgaaaaccgattgttcgacaggtttgtacgggtatttgtgctgcgcctgccttccggcgaggtgcaacgaaggcagaagctcggagaacggagccttgcgggatacgcaggacaccggcgatttttcgattatccgaatggaaagcgtataacgtactgaatatacacagcgaaaacgaccgtgatgccgtgcgatttgagaaagcccattcagagcatcggatttccagattaaaattgctcgccgctatcgaacgggatagaatggaccggttgcgaaaaaaaattaggaaagataatttcgggggatcggtatccaaaccaatccttaatcacaaaatgattcaatattggtattatgttaaattatataagaaatttcttgcatcggccaatatgtcggcatttacgccgatgattatataatgatttataaaacaggtattatccgtgatttctttgtgttttgccgaaggcaaatatgctcgatgcaggaaagttttgtaatgttgcggaccgatcgatctttgatatggatgtggacaattcgtgcggatgtcgttaattttagtaaatttgcaggtaaatatatttgtctatgtttcgaaaaatcgccatattttcgctgataataccgtggttgcttttcagcggctgtgcgtcccgacccgccgacgagcggccgacgatcttcgtatcgattcttcctttgcgcgggatcgtctccgaaatcgtcggcgatgactttcgggtcgaagtgctcgttccgcccggtatgaacccggaaagtttcgagccgacaccccggcagatgatcgatctgaatcgttcgcagttgatattcaatatcggttggatcgatttcgagcagaatatgctgtccaagatcgaggaccgtcgaaaagtaatcgacctgcatcgtggtatagagccgattgcgggcagttgctcccatgcggacgcggagaaagagcatcggcacggcgtcgatccccacatttggacctctccgcgcgaattgcgcactatggccgataatgcttatcgggcgattcacgagctgtatcctgattctaccgtatatgcggttaattatcagcgtcttgccgataaattgcaggctctcgatgattctgttgccgaacggctgaagcagagcggagtaccctatttcatgatttaccatccggccctgacctactatgcccgtgcctatggaatcgatcaggttgccatcgagcaggacggcaaggagccttcggccaagcgcctggcccggcttatcgagcaggctcgccgggacagtattcgtgtcgtattctaccagagccagttcccggcttccaccgtcgaagtgatcgccgaagatatcggggcgcagagcgtccggatcgatccgctggccgaggatgtcgtcggcaatatttcctatattacggatctcataactgccgaacgtctatgaaaactccgctcgtttcgcttcgccgcgtcagcgtgtcgtacgatggtcacgatgcgctcaaagaggtcgatttggatatttatcccgatgattttctcggtatcataggtcctaacggcggaggtaaaactacgcttgtcaaggccatcgtgggaacgatcccctatcgtggtacgatctcctattcaccgcagttgtttcggggaaaggagcggttgatcggctacatgccccagcaatcgatcttcgaccggagttttccgatttcggtgctcgaagtggtgatgtcggggcttcaggggcaaaggggtttccatgcccgctatgcgtccggggatcgagcgaaggcacaggagctgctgcggacggccggtatcgacgggatcgcccgcaaacctatcggcgagatttccggcggtcagatgcagcgggcgttattgtgtcgggcggtgatttcggatcctaaattgttgattctggacgagccggccaattttgtggacaatcgtttcgaaaacgagctctatcggatgctcgccgagttgcacggacgaatggcgatcgtaatgatttcgcacgatctggggacgattacgagtgtcgtgcgaaatatcgtttgtgtgaatcgttatgtccaccggcacgattcgaacatcatcaccgaggagcagctccgcaattacgactgccctattcagcttatttcccacggcaaggtgccgcatacggtgcttgcatcgcacccgcacgactgttgtccgcatacccgtacggaggagtagcccggcttttccggcacctttcctctgactgatagtcctccccgattcggaatcgcgccgcataaaagcggattgatattccgaatcggggctgtcgtatttgtaaagtttcggagttttttctatcttcgaagaaggaacggcgaagacgcacaagcaggaatataaacccctaaatagatcggctatgaaaagaatcggattattgctggctatgccgcttgcagcggccggcctttttttcggcggttgccgcgaagcgaaaaagaaaaactgccgggaactgttctatcggcattatgaggcgcaggtcaagggttttatgcgtgcgacacccgatgccaaccccctcctttcccggaaagtcgcggaatatatgctaaaccgtatgttcgaactcgacactgcgtttgtctgcctggagggagaagcgctggaggcttttcagcgcaaatacggtcggcttctgcaaagggagtatgacagtgtggtcgccgtgtatggcgattgtcgcggtcgcttcgaaaaatgttatgatgagaatatcaagggctttatgcgtacgatgctcgatacggatacggtccttgcccggaaaagagccgcattcgccctgaaacgggcctatgaaatagattcggctttcgtctggatggaaggtgcgcagcttacggaatttctggacagcatccgtcttgtaattcgggaggagatcgctcgcattcggtagagatgccggttccgatgtaggacaaaaacgatgcaccgacgcttttccgcacttacaaccggctcggcacgacacgtgtcagtgaaataaactaacacttaaaacgctgcgattatgaaatggctttattacacagtgctgctgctcgcctgctgccgtatggcggggtgcggcagcgacaaggattcggtatcggtccttccttcggaccctccagcaccggaggagccggagtatgtggacccgacggccggattcagggaagtaggaccctggggaagtatggaggatatgattcctgatgaacacccggactccgaattttctcaatgttactacaattatttttgcctgtgcaataagagcagccataccctgaccgtagcggtttcttcaaaatggaaaaatataggtgggtttttacgaccgggaacaaaatatacccgtaatttcggacaggaagttttcggcacttatcgggatggtcctatcgaatcgttcgacgatatcaaaagcatcaaagtcgtctatgatgaatatttggacgatgttgcgaatatggatttcttttattcgatatccgaacgctatctgttcccctccgaggatgattttgcggggacgattggcgacgagaacgaatggatcttcgaaaaattcaccgaccgtcgtttgcgctgggtctatatcttcaccgacgaagattacgaccgggccaaagccatgtacgacgaacgtatggccaatttcggaaatggcgaaaagtagctcccggattctctgagcgaaaggagccgtagcattgcgtttgcggctccttcccctcccctcctcgctgtccggcagacagagtagtgcctcgttccgggaagagtggtgtgccggatcaacaaaatgtattccggcatatatgcgtccgttgacttgccgccattgtttgttgtcgtacctgttgcctgcacattgggcggcgatgccggccgcaggatcccgatcgtttgtggacataaaaaatacttacggagttgcccccgtaagtattcgagtatgattcgggataattttctatttgttgatctcgctcaacttttcgaacaatttgccgaacgaagcctcgatttcgcggcgcagcgctgcaaagtgcttgcgcaccagcgaaggattatgtgcatcggccggattgttggccttgacgaaaagcgcgttgcgaagagccacgccctcctgcatcacttcgaaaatctctttctctttggtcggctggaagcagatcgccatgtcgcagtcgaacacgagttcctccagacggtagtcgatctcttttttcagcattcttaaatttgccatatctctattcggtttttaatataattatttctgtaaaaaatcatacacggatccacgtacctctctccgccttgtcggaagcgttgctgcatctgcctgttgtaaaaattaaaagagtgcgaacagttgccaacccttgatgtttgttttcctctttccggacagatccgcactcgaatatctcctatccgtttttcggccgtcggctgtttgcatcagtccgagccggcttacctgccgcaaagaagaactgcatcctatcctctgcaaagataaaaaaatcttccggaaatcgagtgcagtcagatcacaaaattcaattacatccgctccggtacgtcgattccgagcagcgccatggccagacggatcgtgcgggccacctgttcggccaggcgcagccgcatgtcgcgggtcgtcgtacactcctctttgaggatcgaatggtcgtggtagtagccgttgaacgatttggccagttcgtaggcgtaagcgccgacgatcgacggagcgaaattcgcggcggcggcctgtacggtcgccggatattcggtcagcgccttgatcagttcgatctcttcgggcaggagcgccgcagcttcgtcctgggtgcggaaatcgatccccgcctcctctgctttgcgcaggaccgagcggatgcgtgcatgcgtgtactggatgaaaggacctgtattgccgttgaagtcgatcgattcgcgggggtcgaacagcatcgtcttcttgggatcgaccttcaggatgaaatacttgagggctcctaacccgaccatcgatgcgatggcgtcggcttcctgcgcggtgcagccgtccagtttgcccaattcgtccgacatctcgcgggcggtcgataccatgtcggcgatcagatcgtctgcatcgacgaccgttccctcgcgggatttcatcttgccttcgggcagctcgaccatgccgtaggaaaggtggtagatgtggtcgctccattcgtcgtatcccaacttcttgaggatcagcttgagcacctggaaatggtagttctgttcgttgcccactacgtagatcatttcgtccagccggttctcctcgaaccggcggaacgccgtgccgagatcctgcgtcatatagaccgatgtgccgtcgccgcgcagcaataacttctggtcgagtccgtcggccgtgaggtcgatccagacagaaccgtcctccttgcggaagaagataccccgggcgagtccctcttccaccaggctcttgcccagcaggtaggtttgcgattcgtaatagaccttgtcgaaatcgacgcccaatgccttgtacgtcacgtcgaagccttcatagacccacccgttcatggtttcccacagcgaatatatttccgggtctttggcctcccagcggcgcagccactcctgcgcctgtcgcatgatcggagcgtttttcttggcctcctcctcgctttgcccggcggcgacgagctccttgatctgggctttgtagtgcttgtcgaattcgacgtaatatttaccgaccaggtggtcgcctttcatccccgacgaggcgggcgtttcgccgccgccgtagagtttccaggccagcatcgacttgcagatgtgaataccgcggtcgttcacgaggtttaccttgatgaccttgttgccgttggctttcaggatctgcgcgacggagtatcccagcaggttgttgcggatgtgtcccaggtgaaggggcttgttggtgttgggcgaggagtattcgatcattacggtacggcccgtcggtgcggcctgcccgaaggtgtcgtttgccgcgacctcccggaagcgtgcggcccagaatgcactgtcgagcgagagattcaggaatcccttgattacgttgaacgccttgatttccggcgtattggccaccaggtattcgccgatctccgtcgccgtggcttcgggcgacttgcggctggctttgagcagggggaacaccacgagcgtatagtcgccctcgaactctttgcgggttttctgaatctgcaacggagctccggcattcccgtagagggtgcttaccgccgctgcgactttatccgtaagaaactgttcaatattcatcgtatgtcgaatttgggtgcgaatttacgctttttatccgaataatccgcgtcgtcgcctctcaataatgcgtcggatagcgaattgcatccgtcgattttcggaaaattgcaaactattgttatatttgcaaaccgtataggctgtccctgcagcgtccgaacggttcggcgttgttgcgtcgtgcgattccctgtccgaaaacaatccgggccggattcgtccgccggggtcgaaggccggagccatccggcccggctttcggtatggaccgcctttcgtttttttattttttcatagcatggaaatattcataatcctcctgctgatcctgctcaacggtctgttcgccatgtcggagatcgccctgatctcggcccgcaaatcgaaccttacggcgcaggccaagcagggcaacaaacgggctcgccaggccctcaagctggcggaagatcccaacaaatttctttcgaccgtccagatcggtattactctgatcggtattttgaccggtatttattcgggggcggccatcgccgacgacctgcgggaagtcttcgtccgctggggagttccctatgcggctcccgtagcgcagacgctcatcgtgatcgtggtgacctatctgactatcgtgttcggagagttgattcccaagcgtatcggtatgacggccgccgagccggtcgccaaactcgtggccggccctatgaaggtgctgtcggtcgtcgcctcccctttcgtatggctcctttcgaagagcatcgagggcatttcccgtctgttcgggctgcgcgataccgacagtcccgtaacggaggccgagatcaagtcgatcgtgcaggaaggcgccgaggacggagctgtgcaggctgtcgagcagaagatcgtcggccgtgtcttctcgttgggtgaccgcagcgtggagtcgatcatgacccaccgcagcgacatcgcatggctcgatgtgaatatgtctgtggatgagatccgcgacctcgttcgtcgggagcctcacggacgctatcccgtcggcgaaggatcgctcgaccggctggtcggcgtcgtctatctgaaggatcttttttcgcatatcggggaccccggattctcgctgcggcagattctctctcctgtcaagctgttccacgagggagcggaggtgtatatggcgctggaacagttgcggaccgagcaactgggttatggcatcgtttgcgacgagttcggcgtcacgcagggtatcgtgactctgaaagatattttcgaagcccttgtaggcgagctgctcgaagatcgtgaagagccggatatcgtcgtgcgcgaggacggcagcgtgctggtggacgggcagtgttcgttttacgattttctggcccatttcggattggaggatgtctattcttcggccgaatacaatacgatcagcggtttgattctggatgagctggaacatattccgcacagcggggaataccttcaatgggagtgtttccggctcgaagtcgtggatatggacggagcacgcatagacaaggtgctggcgacgatgatcgacacgtccgataataaaaataaatagagccttcccgtgcggagtttgtttttgatgccatgaagattgccgacatagaattgggtgaccgcccgctgttcctggctccgatggaggatgtgaccgatccttcgttccgctatatgtgcaagcggttcggtgccgacgtggtatataccgagtttatctcttcggacgggttgatccgcgatgcgggcaagtcgctcgctaaattgcgcatcgccgaagccgaacggcccgtgggtatccagctttacggtcatctggtggaaccgatggtcgaggcggctcggatcgccgaggcggccgatcccgatatcatcgatatcaacttcggttgtccggtgaagaagatcgccggtcggggcgccggatcgggtatgatgcgcgatgtccccctgatggtcgagatgacccgccgcatcgtcgaagccgtgaagaaacccgtgacggtcaaaacccgtctgggatgggatgaagagtcgaagaacatcgaagagatcgctctgcgcctgcaggacgtgggtatcgccgcactgacgatccacggccgcacgcgggcccaaatgtatcgcggcgaagcggactggacgctcattggcaaggtgaagaacaatccggcgatccggattccgatcatcggtaacggagatatcgactccggtcccaaggcccgcgaaatgttcgaccgctatggagtggacggggtgatgatcgggcgggcgacctacgggcggccctggatcttccgcgaagtgaaacactttcttgaaacaggcgaggtgatgccgcagccgtcggtggcggagcgggtcgaaatcgctaaagaacatttagccaaatccttggagatcaaaggcgaccgggtcggaatcctggagatgcgccgccacctgtcgaactatttcaagggacttcccaatttcaaggaaacccgcctgaagctggtgactctgttcgatccgaacgaactgtatgccacgctcgattcgatcgccgatcgttggggcgatttcgacgtgagcggggtcatccctgctccgctttcgcatgatgtgtagctttgttctgcacgagaatcgcttgcctgtcgattcctaagcgtatattttcaacaagggcgaccaaatctttctgcccgcccgaaaagtcccggcagcgtaccggtgccgaatttcgtggagccggaaaattgtcgcttcgtgcgtaaggatctccttttattcgttattcgatttcccgtcatttgtttattcgataactctgtaaaaacaaagcgccgcgagagaagtcgcggcactttttattatcaacgtccggggttatttcaggctgcgttggatatagtcggtgtaatccttgactacgggcgtgtagtcttcctcttcgaacagcggggaggagatcaggaagtcggctgttgagcggtttacagccgtgggtacgttgtaaagcgtcgccaggcgcaacagcgctttcacatccacgtcgtgcggttgcgccgacatggggtcccagaagaaaatcagggcactgatccgttcgtccgcgatcagggcgcccagttgctggtcgccgcccagaggacccgatttcagccgcgtgatgtcgagtgccggttgctcgtagtggtgggatgccgagtgattgagcagggtttcttcgacgatcttgcctgtcgtacccgtacagacgatccggtgtttgctcaatttttcacagttccagtccacccattccgccaggtcgtgtttcatgttgtcgtgcgcgacgagcgccatcattttctgtctgttcatttctttcatccgttttttttgaaagccgcgtttcggctttcggttgttttatactcgatttacggccccaagatgcgaataagccgagtacaaaagcaaatttatttgcattttgccgaggcgaagtatttaagacgaagtcaaagatacgaaaaggagggagcaatcgtgcgggtttgtacgcaagaattgccgaaccgcttcctattttctgcaaagataatgtgcagcggcatcttccgaccactcccggcgcaggtttcatcgaattgtaatgtcgggaaagttcggtattccgcccggaaaccattacccgttgttgcttgccttgagccctcggatcaccgccgaagtgaatccggcgtgttccatttcgttcagccctttgatcgtgattcctccggctgtggttaccctatccacctcctgttcggggtgcgagccgttggattcgagcagggcgatcgccccgcgcagggtttgcagaacgccttcttgagccttttgcgggtaaaggcccagctctaccccgccctccatcgctgcccggatataacggaaggcgaaggcgataccgcaggagcagagcgtcgtggccggaccgagtagccgctcttccaccaattccgctttgcccaatgcaccgaaaatattcaaaaccagtctgttctgatcttcggtcgcattcagccccgtgatgaacgtcatgctttgctttacttcgatggccgtattgggaattgcgcaataaagggctctgtcttttccagcccatgtttgcagctgttccagggaaatgcccgccgctaccgaaatgacgatctgtccatcgggccgcttccctgtcagatgctcttttatcagtgcctccaccatccagggtttcacggcgattatcacgatgtcggccgtagccagagagctgtagtcgcccgtaacggcctgcaattccggattgaacccctgtatttcggcggttttgctcgcgcggcggttgatgaccgtaatgtcctgtggtcggaacaggtcgcaggtggatagtccgcgagcgattgctccgcccatattgcctcctccgacgatcgatattttcatgggtcgcatggttttttatttataaaaatgctccgtccggcaggtgcggaatcggagctgtattgtctattcgggcaaaggttcggcagcggtgcacacctgtcgaaagggagcaccggcgaatctttatgcttcctgctctgcgggcagtttgaattcggtgaacccggcacccacgagggtattgaaccaggagaaaaccttcttcatgtccgatacgtggactcggtcgcggtcgtattcgggcaatacttctgcgaaatatgctttgagtttttccggagcctccttgtggctgatggccggctgtccctgcgtatgttcgtaaattttggtgaaaacctctgcgagcgggatgtcctcgccctcggtgaagatggatatttcggtcagtgcgctcactttggagttgcttgcggcattcatgcgtttgccgtccgacaacgactcgacgatgacgccgcgcgacgattgtgcgacgtatttgtacaaaccgggttggccggaaatggccagaatctctttcaattccataattttttctgttcgatgatatgtttgagtttggttcttcactgtccgttcgggccgtgcggggtgaatccgctccggctcgtaccgttcgaaaatgcggtttcagatggcatatacgctgtattgctgggcttcggttacggaagaaaggccgttctcgttggtcacgacgatcagccaatataccgtactgccggctttctgtgcagggatgattgcttcgtaaaagaccgtgtcggaagtcgccttgaaatagtaggcattggtcgatttctgctccgtgtgctctactccgttcttatcggtccatttgacgtcgtatttcacctgagcgtagaatgcaccgtactggttcgatatattggcctgcacataaactttctgaaccgaagatacccggcctccgtcttcgatggtggctccttcgtccgtgatgaccgggaacgtcgtttgttcgggtcctacttctttcagttcgcacgaaggaatcgcgcaggcgatgaaaatcagaaataaaaaccactttttcataatggatgcggattggctgtgtgtggttactctttggtcaggtgaacgtccatctgcgggaacgggaagttgattcccttttcaggtaatattttgtaatacagctcgttcattgcgaagaaaacgtcccagtagtcctcgtttttcgtccaggcccgaaccgtcagattgaccgaattatcggccagggcagcgatatataccgcaggcgccggatcctgaagcacccgtgcgtctttggacagcagttccaggatagcctcccgtgccgttgcgaaatcgtcgccgtaagagatgccgatcacccactccacgcgacgtgtttcggaggtggaatagttgttgatgatcgcggtagcgatcgaactgttcgggatgaaaatggtttgcttatcaaccgtagtgatcttggtcgagaagagcatgatctcctgcacggtacccgactgtccctgggccgagatgtaatcgcctatgcggtagggcttgagcagcaggatcatcacgccaccggcgaaattctgcaatgtgccgctcagggccataccgatagccagaccggccgaagcgagtagcgctacgattgaggtagtattgacacccagaacttgtatgatcgtaaggatcagtataatatatgagacagtcttaatcaggttgtgcaggaagatttgtaatgaacgatccaccttgcgtttttcgaaagccgtcgagatcagttttatgaggcggcgaataagccagcgtcccgccatgtagatcgccagggcgagtacgattttcaggccgatccagatactttccgacaccagattcgtcaggactttttccaaatccatattagcgattttttcgaccgtttccgcgaatttggctttttgtatgctgtccggaacgatgaggttttcgggctgctgtgcggtgataaaagaaaatcccatgaaagacttaaattttataggttgagtcgcaaatttaatcaaaaaaaccggaaataatagtaactttgctctataatgtatttaacggattttgctatggaaagtaagatagagataatccaaatcaatatttcgggtgaagacaagcccggcatgacctcttcgctgaccgatattctggcccggtacgacgcgttcatcctcgacatcggccaggcgaatatccaccagtcgctgactttgggcatcctgttcatgaccacttctgacaaatcgggcgccatcctcaaggagttgcttttcaaggcttcggaactgggcgtaatgatccgcttcacccccatcaccgaggaacattaccaggcctgggtcggtcgtcagggcaagaaccgctatattatcacccttttgggccgtcaggttacggcacgtcatatcgcaggggtcaccaaagcggtcgccgaacagggactcaacatcgacgcgatcaagcgccttacggggcgtatgccgctcgaggaggagaaccgtgccacccgcgcctgcatcgagctttcggtgcgcggtacgctcggcgataaggccgtgttgcagaaacgcttcatggagctgtccaacgagggggtcgatatttcgttccagaaggacgacatcttccgccgcagccgacgcctgatctgtttcgatatggattccacgctgatcgaaaccgaggtgatcgacgagttggccgaccgtgccggtgtgggccccgaagtgcgggccgttaccgagagcgccatgcggggcgagatcgactttaccgagagtttcacgcgccgcatcgccctgcttcggggactcgacgtttcggtgatggaggagatcgcccgcaacctgccgatcaccgaggggttggagcgcctgatgaccattctcaagcgcgtgggatacaagacggccatcctgtccggaggtttcacctatttcggcaactacctgaaacagaaatacggcttcgattacgtctatgccaatgagctggaggtcgaggagggccgtttgacgggccgtcacgtcggcgagatcgtggacggccgccgcaaggccgaactgctgcgtctgctgtgtcaggttgaaaacatcaacatcgctcagtcgatcgccgtcggcgacggagccaacgaccttccgatgctcgacctggcgggattggggatcgcattccacgccaagcccaaggtgaaagctacggccagccagtcgatatcgacgatcggtctggacggcgtactctatttcctcggtctgaaagattcctggatcgaataaaccgcgatgctgcgcctttcccttcttctcttcgccctgctcgccgccggatgttacgacgatgccggggttccggctccgaagaacgatccgcttccggaggcgaacctctccctgtcggacctctccgcacggtgcggggatacgcccgtgcgtatcgtccaggacatcgtagttgcggggcgggtcaccacgtccgacgaagcggggaacttcttttgctcggtcgtgttgcaggaagacggaacgggcgtggagctgatggccggcctggacgacctgtttcgggtctatcctccgggatgccgcatcgcagtacgtcttcaggggctggctatgtgccgtcgcttcggagtggtgcagatcggtacgatgcctgcggcgggagattatgccgtggaagccatcggtgtccgtgccctgctcgaccggtatgtcgcttgcgaaaccgtcgatgttcgccatcccgttccccggatcgtcgctttcgacgaacttgcacccgacatgtgcggctgcctggtgcagatcgaggatctgacgccgcttccgtcggaagaggatccgacggattggaaatgggaaggttatcggctgttcgaggaccgggccggaaacaggatcgccacctatacgagcacctatgcccggtatgcggcttcggagattccgaaggggccggttacgctggtcggcgttttgcagtacggcaatgccgggtcgatcggaaaatcctatatgattaaaatgcgcgatgagaacgattgttttcggtagcctgctgctcttcgtgctgcaagcctgcggcaatgcttcgtcactggagtacgaatccggggacgggactgcgcggcatgtttctatcgcgtatctgaaatcgctgtgccggggcgttctgtatcccgttaccgaggatctgtggatcgaaggctgtgtcgtgggtaacgatctgtacggcgaattttccgatgcgctcgtcgtggaggatgaaagcggcggaatcgaagtattgatcgacgcgaagcggctctatcggactttcgatgccggaagtacggtgcgcgtttattgcaacgggctggctctgggtgattacgggggcaaggtacagttgggatttccgcccaccgcagaatatattctggaccgtatttcggcggagtcgctcgggcgtcacgtgcgtcgcatcggggacgggtcggtcgatttcgtgcctcgggaactcaccttcggggaggtggctgcaagccgtatcgccacttacgtacgattccgcaaggtccggttcgcgcacgaagaggtcggtctgcccttctgcctgcgggatccggaaaccggccgattgctggctaccgaccgccatttggtcgatgagcggaacgatacgctgatcgtccgattcgcagcttcctgcacgtatgccgaggagccggccccggccggaacgggaacggtcagcggcgtgctcgactatttcaacggcaattatatgttgcgaattaccaatcgtctgatggagtttccctgatttccgcgtttcgatgcgagggtttgcgacgcacccgatagagtttatgcctaaattgttgctcatactccgtttttatcgctcggcgatgctgtttttctgcggggccgtgagcgtggcgttggcctggctcgtgaccggatacggtccgtctgtcgtgccgttgtgccttgcggggaaaatggtcatctatccggtctatctgtatgtttggatcataccgcgttataacgatgagttcgactattaccgcaatctgggagttcgacgacgtatgctgctgggcgcgagttgcggcatagacttgctggcgtgttatatgctgctgaaattcgtatccctcgtactgtatgaacccctctgaaaaacatattctcgaaatagattcggtcgagttgtcgttcggtgatcgggtgattctttcgagtgtatatcttgcggtcgaaaccggcggagcgacggcattgctcggacgcaatggcagtggaaaaagctgcctgatgaagatactctgcggagcgctgcgccccggattccgatcgatgcgcatcgacggcaaatggtacgatcgtttcggaagcagccaggtgcgttatcttccgcagcaggggtttacccccgggtggctgactgtggaggcggttttgcgggacttcggtctggagtgggatgacctgacggtctggtttccgatattcgggaaactgcggaaggcgaaaatccgaaccctttccggcggggagcggcgtattttggagtgtttcgttattctgcgcagccggagccttttcgcagtgctcgacgaacctttctcgcaagtcgcgccattgcatgttgtaacgctgaaagctttgattcgggtggaaaaacaaaataaaggcatcctgcttaccgatcacatgtatcgccatgtgaccgacgtagcggaccggctctatgtgttggcaaacggacagacctatctgacacagggggacgaagaccttgtgcgttacggttatttgaaccatttgtagtattgacgggaaggctttctgctgccggagttttcgataaaccggccttgttctcggtttccgaccgtattttgaccggattctgttgcgggcgtgtccaaataaatttggcactcctcccggcttgcactatctttgcagcaataaattccagttcggagaaggtcgtgtcgcgtatcgccgccggccgaaaatttccgcaccttaaataacaagacttatggcaggatcgaactttgtagattacgtgaaaatattcgcccgttccggacatggcggcagcgggtcggcgcatttccgtcgcgagaaattcgtcgaattcggcggaccggacggcggcgacggcggtcgcggaggacatatcatcctgcgcggcgacagccagtattggacgctgatccacctcaagtaccagcgtcaccagttcgcggaggacggcgaaggcggttccggagcccgctcctcgggtaagaacggtaaggacatcgtcattcccgtaccgttgggaacggtcgccagacgggtgctcgaggacggtacgacggaatatgccggagaggtgaccgccgacggcgaagagctcgtcctgctcaagggcggccggggcggactgggaaactggcatttcaagacctcgaccaaccaggctccgcgttacgcgcagcctggcgaggatcgtcaggagggaactttcattctcgaactgaaggtgttggctgacgtgggattggtggggttcccgaacgcgggcaaaagcacgctcctttcggtcgtttccgctgcaaagcccaagatcgccaactatgccttcacgacgctcgaacccaacctgggtatcgtcgagtgccgcgatcaccattcgttcgtcatggccgatataccgggcatcatcgaaggagctcacgaaggcaagggattgggaacccgtttcctgcgccatatcgaacgcaattcggtgctcctctttatgattcccgccgacagcgacgacatccgcaaggattacgcggtcctgttgggcgaattgacccagtataatccggaattgctcgacaaggagcgcctgctggccatcaccaaatgcgatatgctcgacgaggaactgatcgaagagatgaaaagccatctgcccgagggggttccttcggtcttcatttcctcgatatcgggtatgaacattccccggctcaaggatatgctctgggaggcgttgcaaaaataagataaagtataaaagcccgcttggggaacatataattatacaaaagcctcgtattcttttcggaatacgaggctttgtctttcggtccgaaacgacggggaccagagtgtcggaagcgcggctatcgccggattttccgactgtatcgtttgcggggtcggctttacagggccagcggttcgtattgcagtccccaggcatccgctacctgcttgtaaacgacctttccttcgacgacgttcaatcctaactccagttcgtgattctccttgcaggcgcgacgccaacccttgtccgccagttggatggcgtacggcagtgttgcgttcgtaagtccgagcgtcgaggtgtagggcaccgcaccggggatgttggcgacacagtagtgcagaatgccatcgacgaagtaggtcggcttctcatgggtcgtcggccgcgaggtttcgaagcagccgccctgatcgatggccacatcgaccagaaccgatcctggctccatatccttaagcatgtcgcgcgtcacgagcttcggggctttcgcaccgggaatcagcaccgagccgatcactaggtcggcggtcttgagctcttcgcggatgttgtattccgacgacataagcgttttcacgttttggggcatcacgtccgtcaggtaggccagacgcttgagcgagatgtcgcagatcgtcacgtcggctcccagaccggccgccatacgtgccgccgccgtgcctacgacaccggctccgatcacgaaaaccttggcgggcttcacgcccggcatgccgcccagcagcttcccttttccgccgtgcggtttttcgaggaagtaacaaccctcctgcgtcgccatacgccctgcgacttccgacatgggaatcagcagaggcagcgaacggtcggatgcttcgacggtttcgtaagcgcagcagatcgcaccactttcgaccattgcccgggtcagcggttcgctgctggcgaagtgaaaataggtgaataccagttgtccttggcggatgagtttgtattcaggctctatcggctccttgaccttgatgatcatttcggctttggcataaacctcttcgatggtaggcagcagttcggcgcctgcggcaacgtagtctttgtccgggaatccgctgtttgcaccggcagtcgcctgcacatacactttatgcccacgtttggtaagctctttggctccggacggggtgagcgaaacccggttttcgttgtttttaatctcttttggaataccgataatcataagtcgagtcgtttttaaatttttcggactcaatttatgaaaaatccgtcgaattaccaaattattcccgaaaaatcgaatcgatattaaaatttgtaagatatggaggcgtaaaaggtccggggatatgcgtacagatagcgggtgtccagcggtcggtaaacatacgtgtctgcggtccggatgcggcgtacacggggagattcgtagccgctgaagagttggtctctgtcgttgagaaggttgcgcaccgagagcatcagagtcagacgcgaggcgttgaaataaaacgatttgaaaagcgtgacattcaacgtaaacgcatccccgagccgttcctggcgggtaaacagttcgaaggcttccggcgattcggccagttgccgggcgatgcgcgacgtgcgtcgtaccagcgacggttcgacgaaccgattcccggtccatgcggcctccgcctgtacgccccagcctttcggaccgtaatagttgagtcccgcgaaacccgtcagttggggcgtgttgccgaccgaacagtcgcccatgtagctcgcggcgttgcggtccagcacctcgttgttcgcgtcggcatagaccgtgacgacgggattgtccgcatagcggtaacgtccggcgctggctgccagcgtgaggttccagcggtatgccagccggatcagggcggtcgcttccgcgccgtagcgaagcgttccgatgccggcggccgccatgtcgctgtatgttgcgtagaaatcgtcgtagtagtgccgcacctgcatgccgtccgcagtgcggacgacgaagagcgtcgcccgaaagcgcacattgcgcccggaccaggtgtagttcagttcagctccgtaccgtttctcctcggtcggatcctccaccggtcggttgttgtattcgaggttcaggaaaaggtcgtctccgtcgggtgtccgcgatgaggcgtaaaccgtcatttccagatgatgccgtaccgagaaggagtagcctgccgaggcgcggaacaggtagggcgcgaaatgcagcgcccgcgattttccgaaggatttattgccggcgaaaagctctttttcgtagtgtccccggcggaatacggaggcggctccgacctcggctgcgataaaagcccgcaggcggtcggcacggtattcgagtgaacctccggcgccgatttcattgcgccgcaagtcgtagtcgtagccgaagcgatcgccttcgcggatgatccgatcgggatgacgcagatcgttctggagtttgttgccatagacgccgtcgtcgatcaggtaatagtcgcgatcgacgaaataactgcgccccatcaaatccctcatctgtttgtagaatcgggagtccgtccgggccgcccggatgccgtagcgtaccgtcagtcgttcgctgattcgggtgatgccctccgcgaggagctgcatattggcgatgcgctccacacggtcctccatgagataggtcgcgctgccgtccttgctgtttctgttttgccggtaaaattcgtcccagtcgatttgggtgtagcggacatcgttcgcccgccagatattttccatttcgagccgggttacggggtccgtctggtagccgggcatccagcggtagtagtccggcatcgggctcggagcgtcgtaccatgccagcgaactgtaacgcctgatgcccgtttccgccgtgaaggtcgctgcgagcgaagtcgcatccgtcaggcggatccggtatgcggctgcggccagaggaaccgcttcgcgtcggatgcgcccgctgcgcacttttccgtcctgatagccccacgaagggttgtagaggggatttcccgtcaggtcgaaggcttcccgggtcgatgaggtgcgcaggcttcgcatcgaaaccggtacgacggtcagcaacgagaagagatgcctgtctccgaatcttttggatagaagtatcgctgcattcagcgaattgctgaatacgccgtcggcataaaggtcccgtcccgtgcggccctgtacggtcgccgcaaggtcccagttccggccgaggttttcggcgatggtcaggcggagccccatcaggtagttgcggccggagaattggagtgccgcattgcgctccgggagcagtggctcttcggaggttcggtattcggcgtccagagtcgtcggtaaatgccatccgttcatcggctctccgtacttttggggatacaaggcattcatcgacggaatgtagcgcgacggcagccggatgccgttcagcgacatccggtcgggccggtacggttctccgcggcggttgtaggccacgaatgagaatttgaagtccgtggcgtcccggaacaggtcgcccgtactttggatcgctcggtagaagagcgacgaatcggtgtcgatcatcgggctgtaaggctcttcgtaaccgttctgaaagggataatactcttcgtcccgcagattgtcttccggggtttgggcccggagcgggaaacacccgattaggccgatgacaacgaagagtaaatatctcatttgggtcgtggtatgatacaaatatacccaaataataaaaaaatcggacgcttgggtccgatttatcttcaagtccgtccgagatatggctcccgttttgattccgccccccctgtatccctgacgaaatggcggattccggcagacagtcgccgagctgggttcttaatatcgacgcaatcaaaatcagtatctaaatacttttgtttttattagtttgcctgtttggtcatagtatttccattcgccgtattcccacgtaaagtctgactgagaacttatttcccacaacaaaattccttcactttcgattaccccgttaggataataggatatatgataacatcgataaggtaatacaaactcttcaccatccgagagaataggttgagtattaggcccaaaatctttttgtattgccactaaatatcccttatcatgaaaaaaataccaagtacctatttctttcccatctttatattccccaaaagatattaatgcacctttaccagaaaagtacttgaaaactccagatcttttaccatttatataatacaattcaaaaatagttccttcgtctattttctccctccaaaaaccttctttctgcccattcgcattatattgattgattggaacgtcgtagtctatttgagccgatgcaaaaaaagaaaacaacaaaaatactccggttaaaataatcttatttttcatcctacttcaaacttatttaagttaagaaaaccctgacaaactttattttaactcggccgagcgcgagtatattggacgaagtcaaatatacgaaaaaacagcgagccgaaaccgctttcggagggtttttccgaagaaaatgatcgaaagaatcaggcgcccatgccgaacgagggcgatatgagcgaatgccctaccctctctcccttttacagaatcaggcgggcgatccaggcacaggcttcggcatcggccagcgcatgatggtgatcccgaagatcgaaaccgcagcgggctgcgacggtttgaagctgatgattcggtaattcccggccgaaaacccgacgagacgcccggcacgtgcagaaaaaacgataatcgggataagccatgccgtattgccggaaggctgctttcagacaatcttcatcgaaaggactgttatgggctaccaacggcaaacccgccaactccggagagatgtcggcccaaacctccgggaaaggtgccgcgtgcgccgtatcccgatacgtcagaccgtgtatgcgggtattccaggagctgtaatagtcggggtaaggccggatcaggcgatagatcttctccctgatgtccccgttctccacccggaccagccccacgctgcaaatactggtgcgttctctgttggccgtttcaaaatcgatcgcgacgaaatccttcataagacggtgaaaatatcatcacagatccgctgtgcgacatctgcaaaagtacgaaaacaatccggaaccgtcaagcgggatcacccctttcggaaacggcacgcggccccatatcggatcgaattgcattcggcttgggagaaatccggttttatgactatttttgcaacatatccgggcaactcggcggtctgtaaaaaagatccgcacgttccgttaatgcaatacggaacgtacggatgaatagaacaggaaggccctcgtgcgatccgggacgttccaccacaaaatgagttcggaaatgatgaaattcagaatcggctacggctacgacgtacacgccctcggcgaagggctgcccctgatcctcggcggggtagaaatcgagcatgcgaaaggctgcatcgcccattcggacggggatgtggtactgcacgcgatcagcgacgccctgttgggtgctgcggccctgggtgacatcggcctgcactttcccgacacctcggacgaattcaaaggagccgactccaagctcctgctggcacgctgtgtggaactgctccgggagaaaggttacgctgtgggcaacgtagattgcacgatctcgatgcagcggcccaaactgcgcccccatatcgaccggatgcgcgaaacgatcgcccgcacgatcggaatcgacaccgacgcggtttccgtcaaagcgaccacgactgagcggctcggtttcgaagggcgcgaagagggtgtttccgtcgcggcggtcgccctgatttacagggaatagatgcagcccccgactaccccgcttccgacatggacgctttcccggactgcttttgcaaatccgtcgtcgggaaaatgatttctacgggaggcgggccgaaccacccgacctgcgtcgttcctcgataccaaagcaccggccggcggcagagtttctacttccgaccgatccgaaataatcgccgcagcccaggttgggctgcggcgattatcgttactaccttccgaacctccggtgcgcccccacaacaccttcgccggattcggtccgtcgatgcgaataccgacttttcagcaggctcttgcaatggagtgaccggaacagagcgggtcggaacaaacggcctcggggcggttcgcaaatctactcctcgacgatccgaatcgagagaatcagatcgccgggacggatgtcgtcgatcacgtccaccccttcgatcacacgaccgaaacaggtatgtacgccgtccaaatgctgcgtattttcacggttcatgcagataaagaactgcgagccgcccgtatccttgccccgatgggccatcgagagcacaccccggtcgtggtattgtcgtccggcggatgtttcgcagggaatggtatatcccggtccacccgtaccgtcaccccgagggcagccgccctgaatgacgaaatcgggaatgacgcgatggaacgtcagtccgtcataaaaccgcttcccggccaaattcacaaaattctccaccgtaacaggcgtttctttctcatagagctccgccttcatgtcgcctttttcagtcgaaataatcgcgtatttcatcgtaaattcaataagttaataacctctcttccgctcgctccgtcagattcgcagcttctgcgaaatatcccggttccggaatttccagcgcacgacacggaggcggaacagaagtcgttcattttcaaattataccgttattttccttttcggcaaatgcaatcggccagatgatcgtcaataacccccgcagcctgcaagtgggcatagcaaatcgtagtaccgaaaaacttgaatccccgctttttcatatcccggctcatggcatcggactgaggcgacgaagccggaatttcgctcaacgaccggaaagagttggtaatcggcctaccgtcgggaaagaacgacagggtgtagtcgtaaaaactgccgaactcctcccggacagccaggaacagccttgcattggtgatcgtcgcttcgatcttcagccggtttttcacgataccgtcgaaccgcatcagccgctccacgtcttctccggtcatgcgagccacccgctcggggtcgaaatcgcaaaaggccttgcggtacccctcccgttttcggaggatcgtgatccagctcaagccggcctgcgcactctccagtacgagaaactcgaaaagttttctgtcatcggtcaccaaccggccccactcctcgtcgtggtatttcacatacagctcgtcggttccgcaccagccgcagcgtccgtttataatatcctgcataacatgcacgcgttaagattcacaaagatacgaataagccgaacgcaaaagcaaatccatttgcattttgccgaggcggagtatctaagacgaagtcaaagatagcgaaagccgagaagaaaacaagagcttgctcacagttttccgaggcgtatccgatcttctgcaaagatactatttttcgcctatttcgaaagaaagacacctccgacgaacggaaaaaggccgtggatcgaaatccacagccttcctttcgaatatttcggaaaactcatccgaaaactgccgttacagcgaagtgatcgtacccgaatactgcaccgtaatgttccaggaattggtgatggtcagcgtcgcaccgccggtcttggcataaatatccagtgtaaagacatacctggtcgcggagaagagcgaagtgacgaaagtgacctcccaaccgttggggctctgctccttgagggtctcctcgggattggaaatcgtgtagttgagtaccgtcagataatacggcatcaccgcacccttgacgtaaggcaggaaaatatcgaattctccgtcccaatactgcaatccgaaattcggattggtaatcaggtgctccgatccggccggcataacacgcatactgttgggtatgaactgaaaattgcccgatgtaaccagagaatcgatatagcgttcgtattcagcctgacgctgcgcacgccgctgctcgcgcgcctcccgcttctcctgcttgggactcaatttctggttcttactctgtgtctgtgcgcttaccccgtaacctgcgaggcaaaaaacggcaacgagtgccaatgcgaaaatctttttcataatgcaaagaggttttgcatcatgaaattgcaaaatccttgcctaaagccccaatttctgtaaaaacctgcccgtataactctccggacagcgtgccacttcggccggtgtaccggtagcgacgatccggccgccctcctcgcccccttcgggtccgatgtcgatcagatggtcggcgaccttgatgacgtcgagattgtgctcgatgacgatcaccgtattgccccgatcgacaagtttggccaatacgtcgagcaactggcggatatcctcgaaatggagtcccgtcgtgggttcgtccaaaatataaagcgtgcgacccgtatcgcgcttggagagttcgctcgaaagtttgatccgctggctctcgccgcccgacagagtcgtacagggctggccgagcgtcagataacccagtcccacatcctgaatagccttgagtttctgatggatcgagggaatgttggcaaaaaactcgaccgccatattgaccgtcatgttcagcacgtcgtcgatgttcttccctttgtatttgacttcgagcgtctcccgattataacggtggcctccgcaggccttgcaggtgacatagacatcgggcaggaaattcatctcgatagtctgcactccggcaccccggcactcctcgcagcggccgcccttcacgttgaaggagaagcgccccgccttgaaccctcggatctgggcgtcgggcgtcgattcgaacagcttgcggatgtcggaaaagacgttcgaataggtcgccggattgctccgcggcgagcgaccgataggagcctgatcgaccaccacgagcttgtcgatgtgttccgtaccctccaccgaatcgtaatcgagaggctggtcgtaggaccgatacagcagtttgctcaggatcggacgcagggtttcattgaccagcgtggatttgcccgaaccgctgacgcccgtcacgcagatcagcttgccgagcgggaactcgacatcgacattcttcaggttattgccccgtgctcctcttataataagactcttgccgttgccgggacgcagtttttcgggaatttcgatccggcgacgaccggtgaggtaatccgccgtaatggaatccgcatgcaggatatcgtcgaacgaacccgccgcgacgatccggccgcccttgcgtccggccagcggtcccacatcaacgatatagtccgccgcccgcatcatatcctcgtcgtgctcgaccacgatgaccgaattgcccgcatcgcgcagctccttgaggctgcggatcaaccgctcgttgtcgcgctggtgcagaccgatggaaggctcgtcgagaatataaagcacgtgcaccaacttcgagccgatctgggtcgccaggcggatgcgctggctctcgccgcccgacagcgaacgcgaggaacgggccagggagagatagcccagtccgacttcgacgaggaaccgaagccgctcgcggatctccttgacgatctcctgggcgatcttccgctccttgggcgagaaatatttttcgatgtcggcgatccactccgaaaaacgggcgatcgacatcgcggacacttcggcgatgttcagccccccgatgcggaaatgaagcgcctcgtcccgcaaacgcgtaccgccgcagacgctgcatttcttataaaccaggaactgctcgcgccacttgcggctccggacggagtcctcgtcctcggtgcggccgatgtattcggccacgccttcccaggagaccaggttgttgccgcccgtcgagcagaactcggcgagattgatcgtcagcggctcggaatccccgtacagaatggcattcataccctcctcggaaatcgtccccaccggatcgtcgagcgtgaaatcgtaacgccgccccagcatttcgagaatggcgaaaagcatgttgttgcgatacttgccgagcggctccacgccgccatcacgcagggacaacgccggatcgggcagaatcttctcccggtcgaagaccgcctcctcccccagaccgttgcaatgagggcaggctcccttcggagagttgaaggagaaagtgtgcggcgccggatcttcgaacgccacacccgtcgtaggacacatcagatggcgcgaatagtaacgcatcttccccgtttcgtagtcatagacggccatcgttcctttgccctgccgcatcgcttcgcacagcgaggtgagcagacgctcgcgcagggaatccccgacggccatgcggtcgatcaccaggtcgatcgtatggatcttgtaccggtcgagcttcataccgggggtgaactcccggatctcgccgtcgatacgggcatagagataacctttcttgatcaagctttcgaacagctcccggtaatggcccttgcgccccttgacgatcggggccgtcacagcgatcttgcgtccgtcgaactctttgagaatcagctcgacgatctgttcgtccgtatagtggaccatctcctcgcccgtgaccggagagtaagcccgcgaagcccgcgcatagagcaggcgcaagaaatcgctgatctcggttacggtaccgaccgtcgaacggggattcttgttggtggtcttctgctcgatggccaccacagggctgagtcccgtgatcttatcgacatcgggccgttccatcgtgccgacgaactgccgggcataggtcgaaagcgtctccatatagcggcgctgcccttcggcatagatcgtatcgaaagccagggacgacttgccggaacccgaaagtcctgtgatgacgaccagtttcccgcgaggaatttccagatcgacgttttgcaggttatgcacccgcgcaccgagtattttgatgttgttttcttccacgacgaataaaagcgcggctctctgccgcagcgatgaattataaaacgcgtaaagttacggattattttccacgcagacaagaaagagaatcccggcgcttcggaaaacaaaaatctcgaacgactatccgcctcaaaggacaggacaagacgggacaagacaggacgggacaggataggacgggacaggataggacgggacaggataggacgggacaggataggacgggacaggatagaacggcacaggatagaacggcacgggacacacgttccacagatccagcgaataccgtcgaaacaagatcgctccgaagtcgcggcctttccccgatttcggcaggtccaaggatcgcccccgaccaccggacagggagaacaacccgttcggagcattggaaagcgaatccgaatccgttcagaaaagcgtcgggttcatcttatcctcgtagagattcaggacttcgaccccctgatgccgggcccgacgcacggtataacccgtgccgctgtttctgcgaatgtaccacgcgaccacgcgcacggcatgatccaccagataatcgttacgccggtaataacatccccggctgtaactgtcggccagcaccaccgtccgatcggccgctgtcaggacgtccgcataacgccgtttatcggcgtcggagaaactctccggctgcccggcgaacggaacgacggcgacgagctccattcccgcacactccccgcgcagagcgaggaccgcttcggcggccgccaggtcgaaaccgcaggccatcccgctcaaaaagaagcggaagccctccgaccacagccgatacaccacagcacgcaggattccgtcggccctgccgtcataatcctgatggccggtaaaggccacggaacgatttttttctgcttccacgcccaaaagtaaccaatctgccgtcattttccaacctaacggccaacaatagcgcttcacagcccacaagaacggtccgaaatttgcaactctttcgatcgaactaaaacttcacgattatgaaaaatacaacttgcatcgcaacattcatcggcggtctggtactgggtgccgctatcactgccttggtaacgccccgcacgggtcaggaagtccgcgaatcgctccgcgatctcgccaacaaaggaatcgacaaggcacgcaacaaataccaggaagtaaccggcaaatgcagcgagtgcgacgaatagtccgcccgggtcggcccaactttctacgacaatgaacgagaaccaaccccgcagacatctgatcactccgatcgtcgtattcggaatcaccgccctgatcgccgtggtgatgctgttatgggccctcgtcatctggctcgcacaactgaccggctcgatgatctgggctacgttgattctgggcggtgttttcgccctgatcgccctgatcgtctatctggtttcggtacgtcctgccgttcaatacatcagcgaccagctcgacaacatcgccgaaatggcacagatcgtacgctcgggttacaactggatcaccgacaagttgaacagcatcttgtgctccgttctcgaaagtcttctgcggaaactctgacaaaaagtaccgcaagaataaaatccgaaggagaaggggtcgctcgaatcgagcgaccccttctccttttatactacatccaaatcacgccttgaaatagcgattgtaaagaccctggaaaccagatccatgacgagcttcgtccttggccatctcgtgtacggtatcgtgcacggcgtccaggttctgctccttggccagacgcgccagacgcatcttgtcctcgcaggcgccgcactcggcattcatacgtttgaacaggttggtcttggtgtcccaaacgatgtcgccgatcagttcggcaaacttcgaagcgtgctcggcctcctcccaggcatagcgcttgaaagcctcggcgatttcggggtagccctcacgatccgcctgacgagccatcgccaggtattgtcccacctcggaacattcgcccatgaagtggttgttcagaccttcccataactcctggctggcgcctttgccgtcgccgagcttatgctccgtcacgaaatccaaaccaccggccttctcctcgacctcaacgaacttctccttgcctactttgcacatcgggcactgatcgggtgcctcgggaccttcgtggatatatccacaaacggtacaacgccatttcttagccataattcttctctttattttgttagattgtgtgtgttatttcgtttgcgaagcaaagataggaattatcggggtcacgtcccgcaaaaatccgatcacttttactgatagggcgataaaacaaacctatacgcccatcactgcggctgccggtcgagcagccattcgatataccccacctcgaaggcatctttagccagcacccgcttatctcggtccagcagatacatcgaaggaatggctttcagatcgtaaagctcctctttgctgattcgggctcctgcgtcgtaggcattgatccacgacgacggtacctgcggagcatgagcgcgccacgccgtgagatcttcgtcgggatagagcgccagtacctcgagacgccccgcacggatcatctccgacaacaacggagaggcaacgatttccgcccggatccgttcgcacataccgcagtcagggttattgaaaaacacgagcgtatagtcggcccgaatcccgtaaagcgtccccgtacggcccgaagcgagcgtatagcggaagtcgttggcaggcagccctaccctgttttgcagcgccatacgcaagtcgtgctccggagcgatcttctcccactcgtcgagccatggactcgccacgagtgcctccaacacgggaatatagagttcgtcgctgtgcagcggagagttggggtcgtgcagcacccgttcggccagcatagcgaaatactccagcatggttttcgatccggaagccttgcgcatcagctccgcgacaggcgatgggtcgctttccgtaacgaaattccggatgtacgtatcgaacgcacgcaacatatgtatcgagtcggtcgaaacgataaaaacagtatccgcaaaatccagatcgtcccaaaaatgctcgcgcagataggcataccgctgggcgtcgtccatcgctccgggcggagccacaacccggaaaagacgcggcgggaccttttccggagccgtcgccggtgcggatttgcggccggaacaagacaacagcaccggaagcgccagcaaacagaaaaaatatcgcaacataacgcacaacttcaatcatacggaaacccgagacagtgccaaatctatgaagctatatcgggaaataccttaatcatagacggcaaacggaaaggcccgataacaaacacgcgcttcgacctgccgggataacatttcatacagcacaaatataaccatttttcacgaagcgatacggcggtccacaacaaaaatcggaaacatccgaccgatttgcacggtacttgcaattttacaaatcgtcacgaaaaaacgagcttcaaacagacggataaaacgacattttcaaggtataagcgcaacgccggatttctcccggacgctgccgaaccgggaaaatgaagaataaagttcaaacaatttttaaattcaattattatggatgtgaaaaaagctacaaccagcacagggttcaaattgagtgtgatgacacttgcaattatgaacatcactgccgtagtaagtctgcgaggtcttcccgcagaagcggtttatggcttatcgtcggcattctactacctgttcgccgcagtcgtcttcctgatcccgacggccatggtggctgcggagctggcggccatgttctccgacaaacagggcggtgtattccgctgggtcggcgaagcgtacggcgcacgcacgggatttctcgccatctggcttcagtggatcgaatcgacgatctggtacccgacggtactgaccttcggcgccgtatcgatcgcctttatcggcatgaacgaaacgtacgacatgtcacttgcgtcgaacaaggtcttcacgctaatagtcgtattggctatttactgggtcgcaacactcgtttctctgaaaggcatggactgggtcggcaaaatcagcaaatggggaggtatgatcggtacgatcataccggcaggtctgctcattcttctgggcatcatttacatttcgaccggcggccataactacatggatatgtcgcagggcttcttccccgacctgacgaatttcgacaacctggtattggccagcagcatcttcctcttctatgccggtatggagatgatgggtattcacgtgatggacgtgaagaatccttcgcgcaactatccgaaagccatcgtcatcggctcgctggtgaccgtgctgatcttcgtgctgggcacgttctcgctgggcttcatcattccggccaaagacatcaacctgacccagtcgctgttgatcggcttcgacaactacttccattatctgcgcatctcgtgggcttcgccgattatcgccgtcgccctgatgttcggcgtactggcaggcgtactgacctgggtatcgggtccgtcgaaaggtattttcgccgtgggcagagccggttacctgcctccgttctttcagaagagcaacaagaacggcgtacagcgcaatatcctgctcattcagggcggcgtggtaacgctgctggcgctgctgttcgtcgtaatgccttcggtacagtcgttctaccagatcctctcgcagctcaccgtactgctctacctgatcatgtacatgctgatgttctcggcggcgatcgtgctgcgctacaagatgaaaggcaccgcgcgtccgttccgcctgggcaaaaagggtaacggtctgatgtggacgatcggtacggtcggcttctgcggcgcactgctcgccttcatcctcagcttcgttccgcccagccagatctcggtcggcagcaacaccgtatggttctccgtactcattatcggctgcgtggtagtggtaggcgctccgttcgtcatctacgccatgcgcaagccctcgtggaaagacccgcaggcggctgcggaattcgcacccttccattgggaagtaaaagcagccccggaaacacagaacattccgcaaaacaacccgcaaaatacgggtaatacggctcctgaaaacaaacaataaaagcaatcgtcatgggacaaaaaatcacgaaacaagacgttcgggacgccgtacagcacgccttcgaacagaccaaagcggtctcgggaggtaaaaacgccgactatataccctatctggccaacgtaccttccgacctgttcggcatcgccgtctgtctgcccgacggagagattatcgccgcaggcgacacggaatacaagttcggcatcgaatcggtgtcgaaagtgccgacggccattttagcgatgaatcaatacagcgccgaagaggtgctggcgaagatcggcgccgacgctacgggactgcctttcaactcgatcatggcgatcctgctcgaaaaggatcacccctcgacaccgctggtaaacgccggtgcgatcgccgcctgctcgatggtaaaacctgtcgggaagccggacgcgaaatgggaggcgatccagggattcatcgaaggactctgcggctcgagcgtggaggtcatcgaagagctttacaaatcggaaacggcgaccaacttcaacaacaagtcgatcgcatggctgctgaagaactattcgcgcatctacgacgatcccgatatggcgctcgacctctacacccgccaatgttcgatcggcgtaacggcccgccaactggcggtcgcggctgcgaccatcgcattcgacggcgtgaaccccgtaaccaaacaaacggtcttcaagcccgatctgggcgcacgcattacttcgatgatggccaccgtcggtttctacgaacatacgggcgactggctcttcaacacgggccttccggccaagaccggcgtgggcggcggcatcatgggcgtcgttccgggcgtgatgggcgtagcggccttcgcacccccactggatgacgccggcaactcggtcaaggcccaggctgccttgagcgacatcgtcggacggctcaacctcaacatcttccatccgcgtaaaagcatcctggcagaacaggcataggaggatcgttccggaatgaaaaaggctcgctgtacagcgagcctttttgtatcttgcgattaccacacgacaccgtccccatcgtggaaaaaaccgcacacgagggtcaggtactcgggcatttttccgtcggctccccacttgagttcgattccgaacagctcggaagtcgtgcggcctatgtcgaagccgcaggcttcgagcgacggacgcaccaattcgggatggcggcacgggttcccttcgggacgtgtacaggtaccatcgggacaatagaggcaactgccgacgtaggcgaacgaacgtcctccataccgccgctccatttcgagcagacgcctctcgagccgctgccgttcggggtggatcaaccgctttgcctccgcaatgggaagaccgccctgttccggaacgatcttcgtcgcaataagcaatgccctggaataccgggtcaggtactcctcgacatcgaaatcgaagggaggacatccccaactgcgtccatagttcggacaggtgcggcagcaaccctcgaaacgctcggcatcgcggaaacgggcgatataatcggcgacgggaatcgtcacgctgaaatcttcggctcggtatgggatcatatttcggtaaagagatcgaattgatgcagaaacgtaaaagtaaagaaaaccccgatgacggcacacaggacggcaagcagtgcattcagcacacgcggggagggtttggtggattcgcaggcccgattccggatataacgccggaaaaagaggaagagagcgggtacgacgctgcacgccagcagaaaatcctcgggaatcccgaaaaaatagaccttcgaaagcccgatcaacgcccaatggcagaggaacgtcgccaacacgatattcgcccgctcggagaaagccagcatcaacgcgacggtgaagactgcgaccgagcagggcatcacgggcgaggtcatcatcggaaaagtacgccccagggccagcgagaagagcggataaacgagcggcatacagaacagcgccaaagcaaaccgggagtgtcgtcccgtgcgcccaagcgaatcgtgtccggccgccagatcatagatccaaatacagcccatgaccgtccagaacagggccagaatatcgtaatgttcgcgcggagcgcaatagagaaaataatatacgcccgcgatccagaaattcaatgcggccataaaaaccttcatcgccacacgcaccgcacgcgtcggacgcaggtaaagcaaaagggtcagtacggcggcgaccgcgaccaggaggagctgcacgggccacgtggcggcgttgtatgcggctatcgtattccagaaaacatccatacgaaaagagtttacttgcggttctgtctgcgtcgtgtgagcgagaaagcccggcggttgaagatgaatatcggcagcgtagcgcccgcagccaacaggataatcacgctgaacgacacggtggcattcaggaaaaactgctgcatatattccagcccctgtccgggatcgttgagcgattgcagaaacatgatgagggcaaagaccgtcttgtaggcatagatacccgggaccatcggcagcagggccggaatgtagagcacggtcatcggacaacgaataccccgtcccaaccaaagactgccgaaaccgatgacgacggcagcgcagagcgaagccgtagcgatgtcgatccccgcataactcatcaggcagaaacgcagggcatgcccgacggccgccaacagggcgatgcagggaaatgcccgtaccggagggtcggaaatcgccccgaatccgatagcggccacagccgcgaacaacccgtcgagcagaatatccaccgcaatcatagcaaactgtttttaacgatcatcaacgtcgccgaaagacctacggcaatgcagacgatcagcagcagagcgtttatcagacggctgcaaccgatcaggatatgcccttcgacgatgtcgatcaccccgttgatgagcggcacgcccgggacgagaaagagcgggctggtggctatcgcaacctcggccgtacagtcgaagcccaaggccgacgaggcgcagagcgaagccagaaaggcggaaaggatgaaaaccaggaagtgattcacggcatgcgcctgcatccactgccgggtggaaaaaccgacgagcgtcgaggtgaaaacgatgcccacggccgtccagtccccgccgaacagacgacaaaaggaggcattcgccaggccgaccgtcagcaggacgaaaatcgggtccatacgcggcttggcgatcaactctccgtaacggtcgcgcaggtcggtcagcgacaggtgttcatcgacggcatcccaactcaaagcgctcagatccgaattccgttcgaagctgataggcagcgcagggatcttcaccacacgggtaacgacttcgccgctccgttcgtcgtgcacggtgatgattatgcttttctgaaaactcgacaactgaatatccactccctgcgaggttccgatgcgctgtgcgttgcggatcacacgcgaagtgtgcactcccgatcctaacagataggaagcgtattccgcgacgaaatcgagaatgtcggtgagttcctgttttgttttcatggcggtacaaaagtagtgtattcccgccgaatcggaaacaatcggcgaaaagaaaaattcccggaaagagtttttgtttcccgaaaaataccgttatatttgcggcagatttggtttccggctccttatgcaaggagaggaatgaaaagggaatcgggtgtgaatcccggacagtcccgctgctgtgaagctccgcgacgtttcgaacatctctgccactggtccgcacggaccgggaaggcctcggaacaggagtgagtcagaagacctgccagatcgattcgatgtcaaaggcgctcgtgggttaggcgtttgatttcggttgtgtttcgcttgataaattttaggaaaaccgtctcggcacagggatcgttgtaccgttccggtacaagagattccctcgtctgccacagcggtgtttccggtaatgaacgacaaacgaaagtgcggcgataaccattgttactgccataacattcaagagattaggatgtcgccgcactttttttaaccgacaacgatgaatatcatactctatggaataccggacgatacagccgagctgattgccggacgttacgacctggaactcattcattcgatcgaagagatcggagcctgcggaacgttgctccccgtcccgaaaataaccgtaccccggcaattgttggctctttacaacgccctgatgcgtcacgaggatgcgatcgatgcggtcatcgtctgcgggtccgaaacctgcggtgcggccggcacgatatgctacggggctcctccgggaaaaatcttcacactctgcggtgatccggaaaacgaagagctggaagcggagttattccgactgctcgatgccatcttcacgcaagccaaccgtattaacctctgaaacggcccatttccgaaaaaagacacaaggagttcgattttcaaaatttttccggcacgaatttgctccgaccttttccgcctttgcaaaaaatccgccggaaagaatttccacaacaggatgtccctcgcgcaaccggccttgctgcatgagagcaaaggacgatccaatatcccccgctccgattcggatttataccgtctttccggactgcggtcatcctcggttccgcccaaatttatttggcactgccccgaacctgcactatctttgccgcatggactcaacgaaaggatatattcacgtctataccggaaacggcaaaggcaagacgacggccgcattcggactggccgtgcgggctttgtgcgccggcaaaagcgtttacatcggacagttcgtcaaatcgatgcggtacaacgaaacgaaaatcgggcaactcttcgaccaagtgaagatcgaacagttgggtcggggatgttttatcggcaaggatcccgaagcgatcgatatccggatggcacgcgacggtctgacccgctgcgccgccctgctggagagcggcgaatacgacgtagtcatcctcgacgaactgaccatcgccctgcatttcggactgctgacgatcgacgccgtactggatgccctgaaccgccgccatccggcggtagaagtcgtcgtcacgggacgttatgccccgcaagaacttatcgacgcggccgacctggtgaccgaaatgcgggaaatcaaacattactacacgcagggcgtcctttcccgcgacgggatagaccgctgacaggccaaaagcgatcgtcatcgcccgactacacgggcgcgaataacaacaagggtacgctgccgaaaaaacgcttttttttcattccgaagtaacatttctgcccgaaaacttgcacggggggggggattttgtacttttgcaaaagaaaccataaaaaccccactatgcaaacaaattcccaaatcagacaatcgtccctcgcagcaatgaaggggaactggggatcggcgatcctgctctacgtcgtatcttgcgtactctatgtcccttacggcatcctcaacagaggaggagccattgcaggtcttgcggtcctgctcctgatcttcgtctatctgcccatcaacttcgggcttctgcgaacattcctcgcattcgcccgcgacaagcgccccctgaccatcgaaggactgttctgcgcattcaacaatacctattactggaaagccatcggaacgggcctgttatctggaatctacacgttcctttggacgttgctgctcatcgtccccggcatcatcaagggactgtcgtatgcaatggcgctgtacatcgtatccgacaatccggaaatcggctgcgacgaggcgatcgaacgcagtatggcaatgatgcgcggacacaagatgcgattatttctcatgcaactcggcatgatcggctggtcgcttctcagcctgctcacgctcggtatcgctatgctgtggatagtcccctattaccaaactgtcttcgcgaatttttaccttgaaatcaaggccgaatacgaagcggccgggaacgcggcttaaagaacagccaatcgcccccgcgatcggcactgaaaaaacagacctcgaagcaatgcaatttcgaggtcctgtttttttcgctctttccgaagattccggcaaatcgaaacgtcagccacatcttcctctccctctcgttcgaatacgatcgctctttcgcacgcaaatcgccggcatcgcatgccagacgtgaaatccttgcggaagcgacacagcacctctccttctcgaaccgaccgaacatccggtccgttgcgactccccccaacactgaccgatccgttaaaagcggaagcgaagaccggcgacaagcgatcccatcgtaccgattcccgcttcggcataggccgcgaccttacccccgatttcgacaccgatcggcgaaacctgaaaagcccactgccgggccgattcgctctgcccctcgcccgaagattcggtgaaagtcaggccgacaccgacgcgggaatagagcgacaggatgcgcaggttgagccagcgcatcttcaggtgcggcatgatcgaataatagtcggtcgagattttcttaccggccaaccgctgattgttacccgaatagacgaaagtagcgcccacacccaacccgccgacgatacggaaggtgtaattgaccgacacaccaccccagctgtccatcgacgcatccttcatatcgagcacgtcgagcaacttatcgctgtaagcgtcgatccagtcggtcacgggagcgactccgtaccccaccgaaatttcaccgcgtcccaactgggcatgagccagaccgggcaggccgagcaacgcgacggccgccatcagaagcacttttttcaacataactgtcactgtcagaatttataggataatacaaaaatctggttttaataaataacccgccctttcgtcacggcacaaaattcccgccaaaatcaatgagaagggaagcgaacgaccgcttcccttctcaacatatatcgaattcaaaagtttcgccggtacaatgtaccgcttccctttcaaaacatccgacggcaattaaccgatcgtctcctcctgtccgacctttttgaacagatcgacatcctcgacatccgaatgcatcaggtaattgtaggcttcggcgactttgctttctgccagtttacaatagatccgcgcggaatcgatgtattcggccgattctccggcctgacgagccaacaggtaggtaatgatgatatgaccggcagtttccaccagacggcgggcatggaaatccttgtaaccgctgcgttccttctcgagagtttcgacacgggcgaccatctcctcgaacctcacgcgcaggtcggtcagtttgctcttcacggcgcacatttcgggggcatagtccgcagcctcgtaggtcttgatctgctccaggaaggttcccttcgttacggcattgatcgcagctacgacctgcagctgggaagtaccttcgtagatattcatgatacgggcatcgcggtagaggcgctcgcaaggatagtccttcatgaaacccgagccgccgtgaatctgcaccgcatcgtaagcgagctggttggcatactccgaagcgaagagctttaccagcggcgtgaaaccgtcggccagacgattgtagaacttcatctcctgacgctcctccggttcgagcgaacgctcctgcgcgatgtggccgtactgcttgtaaatctcgacgaaacgggtcgtttcatagagcagcgcgcgggcaccctgcaactttgccttcatattggagagcatctccgcaacggcagcgaactgaatgatcggcttgccgaactgggcacgctcctgcgcatacttgagcgcctcgcggtaagcggcctcgcaaaggcctaccgactgtgcgccgatacccagacgggcagcgttcatgagcgacatcacgtatttgatcagacccatcttacggtcgccgaccagacgggccggagcgttggtgaagaccagctcgcaggtaggcgaacccttgataccgagtttgttctcgatacggcgcaccttaacgccgccgtcacgcttgtcgtgcacgagcatcgaaagaccgcgtgcgtccgaggttccctcttcggtgcgggccagcaccagcgaaatatgaccatcgccgttggtgatgaagcgcttcacgccgttcagcagccagcggccgctcttctcgtcgtaagtggccttgagcatcacggcacccagatccgaaccggcatccggctcggtgagatccatcgcgcaggtctcgcccgcagaaacacggggcaggaacatccgcttaagctcttccgaagcgaattcattgagcgtttcggcacagtcctgcaaaccccagatattctcgaaaccggcatcgccgcgtgccaccatttcgttggcgacgacgaagcagaccagcgggaaattcaggccgtcgtactcgtaaggcagggtcatgccgctcaagccggccttggtaatggcttcgatgttgcgggccgtaccttcggcgtaaacgacatggtcgttctcgactcggggaccttcgtgatcgacgccctcggcattgggggcgatcacctcaccgcacacttcgccggcgatctccaacacgcggcggtagttgtccatcgcgtcctcaaaattctgcggagcaagctcgtggtggtctttcagcgtatagttacgctctttcagcgccacaatcttacgcatcagcggatgctgaaggtggaactgcaaatccttattatctaaaaagaaattagccattacttcgagttttgtttgtaatacttaatcattttcggaatcacctcgttcaggtcgcccgtgatcgcaaagtcggcgatcttgttgatcggcgcatcgggatcggtgttgatcgagatgatcatcgacgactggtccataccggccgtatgctggatctggcccgaaataccgcacgcgatgtagagtttgggacggatcgtaacgcccgtctgaccgatctggcgggcatgctccgtgaaacctgcgtccaccgcagcacggctcgcgccgacttcgccgcccagcacctcggccagttcgtgaatcagcttgaaattctccttcgagcctacgccgtaaccgccggcaaccaccacgctcgcgcctttgatattgatcttgcgttcttcgatctggcggtcgaggatcttgaccaccaggtcgctctctttcaggaacttcttccagtcgatcggcttcacctcgccggcacccggtttggctgcgtactccttgcgcatcacgccctcgcggacggtcgccatctggggacggtggtcggggttcacgatcgtcgcaatgatgttgccgccgaaggccgggcgaatctggtacaacagattctcatactccgtaccggttttcgcgtccttatggtcgccgatcaccagttgcgtacagtcggccgtcagaccgctgaacagcgccgacgatacgcgcggagcgaaatcgcggccgatggaggtcgcaccgaaaagggcgatctggggcttctcctgctcgatcagaccgcacatcacagccgtatggggcaacgtgcggaacggagcgaactccttgtcgtcggccgtccacacggtatcggcgccgtatttggccaactccttggcgatatcgcccagattatgacccagtacgacggcttcgagcttcacgccgagcgtcgtggccagctcgcggcctttggtcagcaactccagactcacgtccgcaggtactccgttttcgagttctatatatacaaatacattattcatatctcgtttcctccctgattaaccgagcgtgtggctcgcgataagttcaaccatcaattcctcgatctgcttgtcgtcggcagtcagtttcttggcttccttggcctggaacaccacattctcgatcttcttcaccttcgtcggggaaccggtcaggcccaactggttatcgtccggatcgacatcggcggcactccactcgaaaatctgcaggtagggcttcgacgcggccatcttggcagcttccgacgtcggttccgcagcgatctcggaggccgtcatggcattcttaaacttcatcacgcggcgggcgttcttcgggcggcactcggcagccgaagcatttacggtcaccacggcgggaatcggacattcgaccacttcggttccgtgctccaggcgacgtttgatgaccagcgacttatctttgatctcgagaatctcctcggcataggtcacctgcggcaaaccgagcttttcggccacctgcggacccacctgggccgtatcgccgtcgatggcctggcggcctgcgacgatcacgtcgggctgaatcttgcgcagcgcacacgaaagagcgtatgaagtagccagcgtatccgagccggcgaatttacggtcggtcagcagataacctccgtcggccccccggaaaatggcgtcgcggatgatgtcggcggcacgcggaggacccatggtcaggatatgtaccgtactgccttccgtttcgtccttgagaaacagggcagcctcgagtgcattcaaatcttcgggattgaagattgcaggcagcgcagcgcggttgaccgtcccttcgggggtcatggcatccttacccacgttgcgggtatcgggaacctgctttgccaggacaacaattttcaactgttttttcatttgtactattttaaatgaataaattttactcgtatctgtatttaccgcacgatcgtttcatcgcggtcggggcctaccgaaataatccgcacgggcacgcccgtttcccgctcgatgaactccacataagccttgaattcggccgggaaatcctcgtagcggcggaatttgcgaagatcgcatttccaccccttgaactctttataaacaggcgcgatcggagcatctaccgcataagggaaacggtccgtacgctcgccgccgatctcgtaggccgtagccacgcggatcgtgtcgaaatcgttcatcacgtcgctcttcatcataatcaactgcgtcaccccgtcgatcataatggcgtacttgagcgccaccatatccagccagccgcaacggcgttcgcgccccgtaacggctccgtattcatgccctagatcccgcagacgggcgcccgtttcatcgaacagctcggtcgggaacggcccggcccccacgcgggtacaataagccttgaagataccgaacacctcgccgatacgcgacggggcgatgccgaggcccgtgcaggcaccggcacaaaccgtattggaggaggtgacgaaaggataagagccgaaatcgatgtccagcagcgtaccctgggccccttcggccaggacgggctgcccttcggcgagcagacggttgatttcgtattcgctgtcgatcaaccggaactccttgagatactcgaccgcatcgaaccactggcgctcgagttccgcgatatcgtaaacatatcccagactgcggagcgtcgcctcgtgacgagctttcacccggtcgtaaacggcccggaattcaggacccagcacgtcgccgacacgcatgcccgtacgacttaccttgtccgtataggtcgggccgataccctttccggtcgtaccgatacgggcgctgcctttggccgcctcctgcgcggcgtcgagcatccggtgagtcggcaggatcaggtgtgccttcttggaaatttgcaggcgccccttcagatcgtggccgctcttggccagcgccgtagcctcctcgcggaaaagaatcgggtcgaggaccaccccgttgccgatgatgttggttttaccgccctggaaaatacccgaaggaatcgagcgcaggacgtatttttcgccgttgaattccaacgtatgacccgcattgggaccgccttgaaaacgcgcaaccgcctgataacggggagtcagcacatcgacaaccttgcctttgccctcgtcgccccactgcaggccgagtatgacgtcaactttattcatgatctttttgaaaaatttaatcgcaaaaaaacgattttgccttcaaaggtactaatttttcgttaaaaacccgttcggggttgtcgaaatctcaaatttccggcacaaaaaaacaagtgtcccctccgaagacacttgcttatagtttaaccgtcagaatattccgagctacaaaacctccactttcgtaccgccgtccacattcaggttcaggatacgctgctccgcccgtttatagagcaccgaaaggctctcgttgggtaccgtatcgacacggatcatgtccgtagcacaacggctgatgtcgagcgatgcgaagcggttgccaccgcaccggaggttctccaaagccgcgttagtcgccaaattgagataagttaagtcgttgtcgctgcaatcgagccggtttagaaagcgcaatcctttgacatcaagattgataagtgcatttccactacaattcaactgctccaggaaaatacatttgcgcacatcgagcgcaacgatctcgttaccgctgcaatcgagcttacgcaaggccgtgaactcctcgatacccgccagcgtcttgatcccgagcgacgaacagtccatatcccagacccgctgggcctcgtagcgggaaatacgtccgtcgccgttcagatcccaatgctccaaacagtatgcttcgaaagccggatccgcaaaccgaagataaacgtaccggttatcttcatcgcgcgaatcctctcccagcccgcaggagtgcagcggcaggaagagagtcgccagcagaactccaaaacctatttttcggatgaaaggattcatttttagcgatcgttttccgtatcggatcgttcggaaacattcggctcggccggaggagcggaaagatcgatctttccgccgtcttccgcatccggcgacgtgcaaaccgcttccgtctgaaccgaatgccattcattctccgactacgccgaacctcgaataagttcggtccggggccgcctgccgaaaaatgtccgaatacccagtaatattatgataaaggggaaaacaaattccgttccgaaaactacatgtcgtcccggtcctcgtcgtcgcccgaattgtcgtcgtcctgcaaatcgtcggcgcctttgatatcgtcgtcgtaatagtccttatcttcgtcatcgtccgcacggtcgtcgatcttcacgtcaatcttcaccagataattgatctcgtccgtttcgaaaggcacagcgtaaaaaaactctccgttaggtttgtcgatgcgcatcatcgcctcggagaatccgaggggatatttttgctttattgcctcctgaagttccgaaggcagattacggaagctggcgacaaggcgttttttcggtgttgtagagtttgccatatttcgatgttcgttttcaatagtcgtttcgttcggcagagcgggttcctccgctccgctccgttcccacttgtcgaaaatgcggaattttctttgtcatatccaagcccggcaggattccgtacctgccgtcgccggtcgatcgtgtggagtttcatccgtcgttttccttcgtccggcgacgccctttttcgggcttcgccgtctccgcgaaccggaaacgtctgaaaattttgtgcaagtataaacaaaatttggcgatcggaatcaaggtcgaatttttttttgcattttttttattttttgcggtctttccgcacaaattatgtacttttacgtacggaataacagaggtatgatacgtgaaaaaatagaaaaattacgtcgcacactcgactaccacaaccataaatactacgtcgaaaacagtccggaaatatccgaccgtgaattcgacattatgatgcgtgagcttcaggaactggaggcggcacatccggaatacgccgacccgaactccccgacggcccgcgtcggaagcgatctcacgaccgaattccaaagcgtcgagcaccgctttccgatgctttcgctgggtaacacctattcgctcgacgagctgcacgaattcatcggacgcatcgagaaagagctcggacagacggagttcgtctgcgagctcaaattcgacggcacggccatctcgctcacctacgaacacggagctttgctccgtgccgtgacgcggggcgacggcacacggggcgatgacgtaacggccaatatccgcacgattcgcaccattccgctgcacctgcaagggggcgactaccccgatttcttcgaaatacggggcgaagtgctgatgccctatgcctcgttcgaccgcctcaaccgcgaacgcgaggagaacggcgaaccgctgctggccaatccgcgcaatgccgcagcgggcacgctcaagcagcaatcctcggccgtagtcgcccagcgggggctggactgcacgctctaccaactggctggcgacgacctgccctgcacgacccattgggagtgtatgcggaaagccagcgaatggggattcaacgtatcggacaagatgcggatctgccgcagccaggcggagatcgacgactacatcgccttctgggacgaagagcgcaggaaactgccgttcgctacggacggcgtggtcatcaaggtcaatagttacaccctgcggcgcgagctgggcttcacggccaaggcgccccgatgggccgtggctttcaagttcaaggccgaacaagcgctcacgcggctcgaaagcgtcgatttccaagtgggacgcaccggagccatcacccccgtcgccaacctcgatccggtgcagttggccggaacgaccgtcaagcgggccacgctgcacaacgccgaacagatcgccctgctggacattcgcgtaggcgatatggtatatgtcgaaaaaggcggcgagatcatccccaagatcacgggcgtcgatcttgcggcccgtccggcggacagccgtcccttccagtacatcacccgctgtccggaatgcggcactccgctggtgaaatacgagggcgaaagcaagcactactgtcccaatcagagccactgccggcctcagatactgggccgcatcatccactttatccgccgcaaggcgatggacatcgagggattgggcgaagagaccgtcgaactgctcttcgaaaacggactgctgcacgacatcgccgacctgtacgacctgcgggccgaacagctcgcctgtctgccccggctgggcgaaaaatcagccgagaacatcatccggagcatccggggctcggtcgaggttccttttcagcgggtattgttcgccctgggcatccgattcgtcggggaaaccacggccaaatacctggcggcacacttccgcacgttggatgccgtgatgcacgccacgcgcgaagagttgatcgaagccgacgaggtgggcggcaagatcgccgatgccatcatcgactacttcgccgacgcggagaacctgcggatcatcgagcggctgcgcaaagcggggctgcaaaccgaagccgcgcacaaagccctcgaatcggaaagtctggcgggcaaaaatttcgtcatcacgggcagattctccggtcacagccgcgacgaactgaaggaactgatcgaagcgcacggcggtaaaaacctcgcggcggtatcggccaacgtcgattttttggtcgcaggagaaaagatcggaccggcgaaactccaaaaggcgaccaaactgggcgtacgtctcatctccgaagaggaactgctggcgatgatcgcttccggcggaacgctgcccgtgacagagaacgcttcggacgggaacacgtctgcggcacccccgtcggctcaggaaacgaccgacaaaaccgacggcggcaacacggaacaggggtcgctgttttaggcgggaaacggcactccccgggccgagaaaacgcacaatattatttcgggcgcatgccctgacaccgaaaataatgatgtaaaaaatcagaataatacgaacgaactcctttctcgctcctacgctcgccaggctccggccgggcagtttccgactccttccgaaaaggaaattcaaaggaaacgggatgcaaatacgcagacagcggccacgaacggccgcgaacggattcgaaaaacaggacgaagcctcggaagcgttcaaggatataattatcaaatataacattatcaacgatatgacacgacacaaactcagcggcgccggcgcagccatccccacccctttcacacccgacggacgggtggattatccggctttggcccgcacgatcgactacatcatcgacggcggtgtggatttcatcgtcgcactcggcacgacggcagaaaccccgaccctctacctgcacgaacgggccgtggtcgccatgttcatcaaaaaccacatcgcagggcgcgtgccgctggtgatcggcgtaggcggcaactcgacctcggaagtgctcgaccagttgcgcgaattcgacctgcggggggcggatgcgatcctgagcgtcacaccctactacaacaaaccgtcgcaggaggggttgtaccagcacttcaaaaccgtatcggaacattcgcccctgccgatcattctctacaacgttcccggccgtacgggggtcaatatgaccgcagcgaccacgatccgcattgcgggcgacttcccgaatgtcatcggcatcaaggaggcttcgggcaagatcgaccagattcaggagatactcgactggcggagcagggattttctggtgctctcgggagatgacgccctgacgctcgacctgatgagccggggcgccgacggcgtgatctcggtagcggtcaatgccttcccgcgcaagatgatgacttgcatcgacctggcaaagaagggcgacttcgaaggagcacacaaggcttacgaatgtctggaggaggccgtgaccgccctcttcgccgaaggcaacccgacgggcgtgaaatgcgccatgtcggtactgggactcatcggcaacacgctgcggctgcccctcgttcccggaaccccgcagctcgaagcccgcttcaaagaactgatcgccaaatacgatttgaattgatcgcacgtttatataacaatgcggcacgaaacgggttccgcaccgtattcgcacactgaaccgccgcacacaaaaggctatgagaaaattgcttgtcctgctgctgtttctgcctctgatggcaacggccaaaatacctgtcgaagaggatattatccggcagacgctggattccgaatccccctactactacccgaacctgatgctgcggtaccagtcgggcgacgacacgatgaccgaggaggactaccactacctctactacggatatgcctatcaggacgcctacaagcctttgaatcccaattcggacatggacaaagccatgctgatcgcccagacggtcgatttcgagaatccgacgcacgaaagcctcgagaaactgatctctgcggtgaacgatgccctggtgcaggatccgttcagccccaaactgctgaacctgctggcattcgcttacggagcgctcggcgactcgaagaacgaacagatcaactacaaccggatgaactccatcctggcgacgatcgaggattccggcaacggcctcaaggaagggagcgcctggcatatcctgatgttcggacatgctctcgatctgctggccgcacacgaccgtcactacggcaaagcacgcgtcgtcagccgctcggtggaatatgtccccctgctcgagccggtacggaccgaagagggacggatcaagggatattacttcgattacagccgtatctaccggaacaaacccgacggctacgtattcaaacgtccccggacctggcaattcaataatctgcgtccgagggaatataaataaagtttttcggaacgcccggcatgatttcaaatccttaatttataacaagatgaaaacaacttttttctccgaagcatccagcaaaggcaccttcctccatacgcgggggggggagtatttctaaccttcacaaaacgggtacgaaacgccccgaacgagatccaaatgaaaaaattacatcatatagtgcttgtccttgcactcgcggcgaccctcttcacgggctgcaccaaggacgaaggggtcactccccgcccgccggtccccgaaacggcggaccagaccattatgttctatctgacgggaaccaacctggggtcttacttcaggaaaaacgtcgatgacgcgatgaatgccatcgaccggaacatactccacaacagtcgcgtactggttttcatccagcctcaaagaggcctttcgatggtattggaactctactatacgccccgcaacgacgattacgtacccggagcacagttttcgtacgaacactgcaaggtcgataccctgcgccgctgggcggacgccgacttcaactcgatggacggaggtacgatcaccgaagttatctcctacatggccgaacaggctccggcacgtcgatacggcctgatcctcggcggacacggactgggttgggtcccggacggtacgtcggtcaatgctatccggttctccgcattccaggatttctggagcccgatgccgaatgccctgccgacccgctggatgggcgattccggcaagcgggctgaaattccgcaactggcagcggccttcggcaacacggggctgcatttcgactaccttctcttcgacgcctgcttcatgtcttcgatcgaggcattgtacgatcttcgcggttgtgccgatcacatcatcgcttcaccgtgtgaagtgatggccgccggtttcaactacaccgatattctgccgcacctgctcgccgatgcaggcacaagttacgacctgccgggagtctgcagcgaataccatgactactacatgaaccgcgcgaccacgaaatcgggctgcatcgccctgacggtcaccggcgaactggagccgctggcggctatcgtcaaggagatcgaaacgaagtatccggggcaaacgtacgaccgggcatcgctgcaaacctacgaagggctcgacgagcatgtattctacgacttgcagggatacatcgaggcgatctgcgacgaaaaggatccgctgctcgataagttcagggcgcaaatgggaaagaccttcccgacggaaagccggctgcatacgccttcgttctactcggtatatggattgggcgacgctccgaacgggatgcatacgatcgaagacggaaaatattccggcgtaacaaccagcgccccgtgcgaacgattcgccccggaatggggacagaccgcctggtaccgggcgacccactgatccgacggatcagaacggaaatcctcgatggaacatccgacaagaaagccgaaatccaaagatttcggctttctttatacatcgcttaggcatcactcctattcatactgccccgacttaaggcgctgcacctcctcgcgggtcagaaagcgccactgtccccgcttgagatttttcttcgaaagcccggcgtagtaaacacggtcaagtttcttgaccgcataacccatatgctcgaaaatacggcgcacgatgcggttgcggcccgaatggatctcgatccccacctccgtcttgtcctccttgacataggcgatctcatcggcatagatctcgccgtcctccagcgtaatgccttgagcgatctgctccatatccgctttggtgagaggcttgtccagcgacacctggtaaatcttcttcttctggaacgaagggtgcgtgagttggcgggtcagatcgccgtcgttggtgaaaagcaacagcccgacactattcttatcgaggcgtcccacaggatagatacgctccgtacaggcgtccttcaccagctccatgaccgtcttgtcggcgtggggatcgtcgagcgaagtcacgtaacccttgggcttgttgagcaccagatagaccttcttctcgccctcgacacggctgtcgttgaatttcacctcgtccgtaggctggactttcgttcccaacgtcgtcacgaccaccccgttgacagtcaccagccccgcctggatgaaatcgtccgcttcgcggcgcgaacagatccccgactgggcgatgaaacggttcaggcgtatctctcccgtctggttattgggattgtatctgggataacttcggggcttatcgtcccggcggccgaacgagtggtcgccgccccggaacccaccggatttccgatcgtcggaacggcgttcaccgtaaggcttatcgaatgtcttgtaaccgtcctgtttgcggtcgtcgtaccgacgttcgccgtaaggtttgtccgaacggctataaccgccggatttccgatcgccgaatgaccggtcgcgcccctccttctgctcaccgtaagatttgccgaacttcttgaaaccgcccggtttgttatcctcgtacgggcgggaagcgtacccgtctttccgctccgaaaaacgaggcttgaactcccgatctgcggcatcgttcctacgtcggtcgtccgaaccgaacgaccggttcccggaacgacaggaatcgtcacggtgcgcacggtcttcccgcacgggacggttgtcgctcgtaaaattagggttgtaggatgcgcgcggacggctgtccgaagagtgctccgaatcggcggcatcacgctgcaaacgcgggcgacgctcgatacgctccgcagaggaaatacgcgcccgcttatcgcgcccgaagcgggccaacgtcgtatccgagtcgtttttgaaatctttcataatcgattctgtgagttttgcgaatttaataagtcgtattcccggaaatcgcaatcgtcgatggaacccgcaaaactcacgctacggcgttttacgacgccaggtcccaaatcggcaatttcactcgatttcccctgcataacagggaaaaccccggcattccgcaccggccgaaaataccggtgcaggcagcaaaggtaatcgaattttcgggataacggcaccgacagccgctattttccggaaaaagaggattatccctgcggaaatccgatcgaaataccgtgccaaaatatttccccttacccgtaaaagccgtatatttgcgcatcaaaacccaggacatgaaccgagaaatcctccgattagccgctccgaacatcatctccaacatcacggtcccccttatgggtatcgtgagttccgccgtcgcaggacacctggacaactccgcagcgacgatcggggcactcgccatcggcgtatccatcttcaacttcatctactggaactgcagcttcgtgcgcatgggtaccagcggactcacggcgcaggctttcggtgcaggaaatttccacgaatgcaccaacatgctcgtccggggcatcctggtcgcagcgatcctcggcctgctggttatttgcttccaaaaccctctggggcgactggcactatgggccatgaacggcaacgaaatcgtacacgactatttctacgcccgcatctgggcggtacccgccggtatcatgctcttcggattcaacggctggtacacaggcatgcagaatgccgtgatcccgatgtgtatcgccgtcacggtgaatatcgtacacgtttccacgagcctgtggctcgtattcggacacggcatgggcatcacgggcatcgcctacggctcggtcgtggcccaaaatacgggagttctgctggctgtcctgctgcttatcctgcgataccgcaaaattctcacacggtttacgtggcgtgaagtggtggactgggaaccggtgcggaaatttttcctcatcaaccgcgacatcatcgtccgtacgctctgtatcgtagccgtatataccttcttcacggcggcatcggcccgtatggaggacccgatcctgctgacggtcaatacgcttctgctccagatattcacccttttctcctacatgaacgacggcttcgcctatgccgccgaagccctcacgggacgcttcatcggagcccgggacgaacaatcgctgcgtcgctgcctgggacgttgtctgggctggggcacactgatctcggtgctgttcgtcggcatatacctcatctggtggcgcgacctgttgggcattttcatcaaggccggaactccggacgcagcacaggtcgtttcgacggcgggtaattacatcgtctggatcatcctcatcccgctggccagcgccatgcccttcatcatggacggtatcatggtgggtgcgaccgaaaccaaagtgatgcgcaattcgatgctgctctcgaccgtcgcctatttcggtatcttctactcgctctatcccgtcatcgggaacaacgctctttggctggccttcacgctctatatgttcctgcgcggcacgctgcaacttctgatgacccggcgcctgcggctcatctatcgaaaagctgcggcataaatttcccgacgtatcttcgccctgcaaaggacggcccttcctctccgccgatccaaataaccggggttcttcatccggcagatccctttctcttcaactactgcatacaccgtactgcaataaatttttcaacagtaacgaaaagattatacggaactttcctcttcgcaccgctgccgccatttcggtacagggaacaaacgtgtctgtaaacaaagtgatcggttaaaaaacaaaaagcccggagcgtcttgctccgggctttatttggaaaccaacgttcgaattacatctgtttgtaaagctcgttgtatttctcgtatttctccatcatgccgggttcgtcgcgcagacgatagcaaagagtcttgagcagctgtacgggatcgggattctgcggcataatctcatgggcaacttccagatagggaacagcctgcgaatagatcgaaagaatctccttctggtcagcttcatactcgccctcattggtatattctttctcattggcctcctgattcagtgcatcggccttcataatgatgtagtaacccgtaaagaactgcgcttcgtaagactgaggattcagttcgatcgccttctccagggaggcaatcgcctcatcgtaatcctccaacgaaacgaagatctgggcacggctgaaccacagttcgatgttctggggatcaccggcaatcgcatcgtcgagcatcggaaccagctccgacgaatcgcccaatccctcttccatcgaatacaacataatcaaactcttgagaatatcctgattcttcgggaatttagtaataccggtcatcagggcgtctttggctttcaggacattggcacggtccgcctcacgctggccataatagttatggaacaggtagtaatagatcataccgttgtcatccgtatatcccatttcaagcgccttattcagcaattccacgccgcgagcatattcagcagcgtccttctcgccggcagcagcggccagatagcccgcatagtaaaggcgcgaagcgtcgggagtaccgcaagccggactcatctccgcgcggaaagcggtttcgaaagcctccgaaccgagtttgtattcaccgatattattacaggcatcgcccaattgcgaacagtagttgctgatcgccataagctgctccttgactttcggaccctgcttggaatcgagttcgtaagccttgttcaaagcagcgatcgccttatcgatagcaccttcctttacgggttctatctccttccagccgattacctggccgttcgaaacgtaaaccgtcatgtaatcatagttctgtgcagctaccgacaggccgttgatcgtaacctcatcgatcgatttcggatcgcccagcgacaaactcaactgcaaaccgggttctccgacatagaggtccttggtaggagcaagtatagcctcgacatagctcttacccaaattgagccaggtagcggctttcgctcccttcttcgcatcggcactcgccgtttcgttcttttcgatcttctgcaacaaggcctccttgttgattttctgtgcctgggcagcagttcccaacaaggcaacggcggccagggccaaaataagttttttcataatgaacggggtttttaatttataggtattatcttctattgttctttactaacgttctcttcggactcggattccggagcgcccgccccatcgaggaccgccggctcctcctcttcgttggcgggaacggcaattaccgaagcgatggcatctccctcacgcaggttgatgatacgcacgccctgcgtagcacgtcccgccacacggatctgatctaccgccgtacggatcgtcagccccgaacggttaataatcatcaggtcgttctcgtcggtcacagcctggatcgaaatcagcttgccggttttttccgtaatgttgatcgtcttcacacccttgccgccgcggttggtaatgcggtattcgtccagatcggtacgcttgccgtaaccgttctcgctgagtaccagcacgtcctgcgagctattgggttcgatgcagatcatgccgaccacctcgtcgccttcgtcgagcgaaataccgcgcacaccggccccgacacgtccgatcggacgcaccgtgttctcgttgaagcggatcgccttgccttcccgggccgcgatcattacctcggcgctgccgctggtgagtttggcctcgatcaactggtcgccctcgcggatcacgatggcattgacgccgttctgacggggacgcgagtacgcttccagtttggtcttcttgatcgtgccgtccttggtacacatgatgatatagttgttgttcacgtattccgcatcgtccagacgcttcacgttgatataggcacgcaccttgtcgtccggctcgatctggatgacgttctgaatcgcccgtcctttcgaggagcgcgtcccttcgggaatctcgtaaaccttgagccagtagcagcggcccttctccgtgaagaagagcatcgtattgtgcatcgtggccatgtagatatgctcgatgaaatcctcgtcgcgcgtcgcgctgcccttggcaccgacgccgccccggttctgggtacggtattcggccagcggcgtacgcttgatatagcccaagtgcgaaatggtgatgaccatctcgtcgtcggcgtagaaatcctccgggttgaactcttcggaagcgtaaacgatctccgagcgccgttcatcgccatacttggccttcacctccaacaattcgtccttgacgatcttcatctgcaattcgcggctgcccagcacatcgttgaaataagcgatctgcgcctccagctcgttgcgctcggcaaccagcttgtcgtgttcgagtcccgtcagagcgcgtagacgcatctcgataatggccgaagcctgtgcgtcgctcaaactgaagcgctccatcatggcctgcttggccaagtcggggttcttggctgcccggatgatgtggatgatctcgtcgatgttgtcctgcgcgatgagcagacccaacacgatatgcagcctcttctcggccttggccagatcgaagcgcgtgcgccgcacgatcacgtcgtggcggtgctcgacgaaatgccgcaccagatccagcagattgagcatcatcggacgaccgttcaccagcgcgatgttgttcaccgcgaacgaggtttgcagcggcgtattcttatacagcgtattgagcaccacgctcgccacggcatcgtgtttcaggatgacgatgatacgcatgccgttccggtcggactcgtcgttgatataggaaatgccctcgatcttcttttcgttgataaggtcggcgatcttcttgatcatctccgccttgttgaccatatagggaatttcggtgatgacgatgcactcgcggccgctggccgtatgctcgatctccgtgcgggcacgcatgaccacacggccccggcctgtcagcaacgcttcccgaaccccttcgtagccgtaaataattcctccggtcgggaaatcggggcccttgacgtacttgagcagttcctcacatgctatctccggattgtccacgaaagcacagcaggcatcgatcacctcgcccagattgtgcggcgccatattggtcgccataccgacggcgataccgctcgcgccgttcaccagcaacagggggatcttcgtcggaagcaccgtaggttcggggatcgtatcgtcgaagttgagcgtccaatcgatcgtatccttgtcgatatcggccatcacctcatcggtgatcttctgcatgcgggcctcggtataacgcatcgccgcaggcgaatcgccgtccatcgaaccgaagttaccctgaccgtccaccagcgggtagcgcatcgaccaatcctgggccatacgcaccatcgcttcatagaccgaactgtcggcgtgcgggtggaacttacccagcacgtcgccgacgatacgggcggatttacgcgtgggtttgtcggagtagaggttcagttccgcactcatatcgtaaagaatacgacggtgtacgggcttcaaaccgtcccgcacgtccggcagcgcacgcgatacgataacggacatcgaatagtcgatgtaagcggacttcatctgctcttcgatattgatgggaatgatttttccctccaatccggcattcttttcttcttctgtcagcatgttattctttgagtttctctcttcgttttctctgcccggcatggcccgaacgcatcccgcgccgcccttcgccggtcgaaaacatcgaactttaccccttattttctacattcggactacttcttcgcccgatcgaaaacagcgggacttgcgttctttgttctcttcgctcggtccgacgagtctattcgtcggttcccgcttatcgaaaacatccgaaaatacattctataaacacacaaaaatagcatttattcgtcgaataagcaactttggacccaataaaatcacccgtttccgcaagttttttcaccgcacacaccattttcagcccttttcagccgttttgacaacatcaaaaaaatcccccggcaaagtgtcggggaatttcaaagccgttcggacaaattttatacatcacgccctatttacgaccgccagcacgatcgggaaaaatacactaccggaaatcgatccactcgtacccggcgtaattctccgcatcgaaagtgcggggcgacgcctcgtgaacggtgacggaacggatgtcgatccgaacccggtcgccgtcgatttcgtagatcactgccgtcggcagcgaacgggccgtgtccacttcgacgtcgatctgcccgacggccgactggatacgcagcggagtaagccggattacggccgtgcttcccttctcgctcaaaagcgaggcggcatattcgccgtcgatgaaatcgaacgcccgggtgggattattgagcagattatgggacgtgagatccacacggtcgataaccacctctttacgatcggggtcgatttcgtaacggaactccgcatcgccgtaaacctcctgcccattgacatgcatatagtagttgtcgccgctcacctcgtaatagcccggcacgacatccccgtcggtatgcacctcgaagactacgctgtacccctccagcgctccgagcgcagcggtcagttgcttcaacacggcctgcggccggttatcggcctggacagagaacacggcaaacagtgccgccaacaacaaaacagatcgtttcataagatattttttccgattatactccgatagaccgaaccgtcgtcattccgtcgatttccgcccgaatacatcggccgaatctgcaaatgtactccgaaaccgctccgacaacggtcgaattcaaaaatccgaaaaacgacaatcgacatcacgaatgtttcgaccatccttattcaatatattcaatgcgaaaccaattttagtccgacgatagaaccgaacaaggtaacgataaaaaaaatccgggcgaaacccgccgattcgccgaagacgaaaatccccagcaacaccgtaccgagagctcccacgccggtccaaatagcgtacgcggtaccgatcgggagcgtctgcacggctttggccagcaaacccatactcaacactgtcgccaggacgaaccctccgatccaaagataaagctccgcaccctgggcccccttggtcttccctaaacagaaagtcatggccacctcgaaaactcccgcgataaacaatacgatccaattcatcgttttctccctcgtttttattccgaattaccaatccgaagagtgttccgcaccccgctttcgtacgacaagacaacggcaatccctatttcataatacccaaacacattcaagcctcgtccggagcgatcatcgcatcaaaatactcccaactcctgtaggcgggcctccagcgaaggcaggtcgtggaagagaatatcgcgcggcttggctccctcctgacggccgacgatgccggcccgctcgagctgcatcatgatccgaccggcacggttgaagcccacctcgtaattgcgctggatcgaagaggtcgaaatctgtccctgcgacacggctgcacgggcaatgtcggcgaacagcgtgtcgtagcgcaccggagccccgctctcgctgcccagcgacgaggattctccgccactcgattccggcacgtaatcgggcagccggtaggcttcggaatatccctgctggcggccgatgaaatccacgatccgctccacttcgcgggtttcgaccagcgcacactggatacggatcagctccccgtccttcgagaagagcatgtcgccccggccgataagctggttggcgcccggctgatcgatgatcgtgcgcgagtcgatcatctgcatcacgcggaaggcgatacgggccgggaaattggccttgataccgcccgtgatgaccttcacgtcggggcgctgcgtggcgataatcaggtgaataccgatggcacgggctttctgcgccagacgcatcacgggaccttcgacctcgcgggccgtcataatcaggtcggcgaactcatcgaccacaactacgatatagggcaggtagcggtgtcccttttcgggattgagccgccgcgccgtgaatttatcgttgtattcggcgatgttgcgggctcccgccatcttgcaaagttccagccggttgtccatctccgtacagagggagttgagcgtatagaccgccttgcgggggtcggtgacgatcgcttcgtcctcggactccatcttggccaggaagtgcttctcgatcttggaatagagcgagaactcgaccatcttgggatcgatcatcacgaacttgagctgcgaggggtgtttcttgtaaagcagcgaggtgatgatggcattcaggccgaccgacttaccctgacccgtagcaccagccacgagcaggtggggcatcttcgccaggtcgaagacatagttctcgttctggatcgtgcgaccgatcaccaccggaagttcggctttcgactcctggaaccgcagcgaacgcacggccgaatacatcgacacgacctgcttgtcgcggttcggcacctcgataccgatggtacccttgcccggaatcggagcgatgatgcggataccgagcgccttgaggctctgggcgatatcgttctccaatccctgtatcttggagatcttgacgccctgggcctgcacgatctcatagagcgtcaccgtaggtcccaccgtagctttgatccgctggatcggaatcccgaaatccttgagcgtctgttcgatcttggatttgttctcgtaaatctcctcgtcgctcacctgcgaatcggacgtataatcctcgagcagcgtcacgggcggacgctggtagttgttcagatccttcaacgggtcgtagagactgctctcgatgcttttctcgtccacgaccttggcctcgcgtgcttcaacggtcaccacgacgccttcggccggaatttccggctccgccgtaagcgtgtattccgtaattccgtccacgaccggcgcaggctccgatgcatactgcggctgctcggactcccggggtgcggtaaaggcagcgtcggcttcgcatcccgaaagatcgacctcggtaaatacatcgtcgccccccacgatacggggtccggcaggacgggacggagccggctcgacaaccgtcgcaggagcctcttccgtaaggggaatttcgaggaagggactctcgtccggctcatcggaaacgggagccgcaaccggcgcaggccgctgaatcgtcacctcggccactccatccgcagcggaagtgcgggccgacgcatcgacgggtgcaggcacgggttcgggctggggctgttcggattcgggtttagaatcgggttcaggctcggcatcggtcttctcctccccggatttcgaacgatggtcggcgacattcacgaccgactgtttgaccagatcgacgatcttgccgcccttgtccaccattgcattgcctgccgtattgaccgtattgatgaagttgcggttgatgaacacgcccgtcagaatccaggcgcccagcaacaggatgatatttcccagcacgccgatcacgctcgtcagcctccgggcgacctcgaccccgaaggcaccgccccacccgctgccgaaaacggcccacttctcgccgaaggcgaagcccaacgtaagggaacccagaatcagaatcaacaaagctccgagcaccgaatggttgaaaagcagcggacgctggcggatgatccgcactccgaccatcgtgacgatcaggggcaaaatgataccgaacaggccgaacgaacgccccaccagacgctcggccaaccaagccccggcgtaaccgcagggattctcgatcgcatccgacaggtctgccaggcggggatcctcctgttcgacaccggacacaaggctcatgtcggcccgccagtcgaaatagtaaaacagcaccgaagccgtcaggaaaagccccgcgaaaagcagcagcaagcccagtatccaacgcatgctgtcacggttggaacgggaggtagcctgcgggctttttgccgaactgtttttcttggtagccatatcgtatatttatcgagcgaaggtagggatttttttcggaaagttcaaatgcaggatcggtttcgaaagggccgcccccccgattccgtttccggaccgcagccggtgcggagccgctaaccgaaagccttgcattccagccgcgaccggtacgcttcatccgcaaaggtaaggaatccgtaattcgcggcggcgcctttttcggcccgcaggtcgtactggtcgagcaactgccccaccctgcgtcctacggcaggcgaaggatcgaccacggcaaccccgcgttcaccgatcacctgccggaaaaccgggagcaggaacggatagtgcgtacaacccagcacgatctggtcggcaccctcgcggatcatcggctccagcacgcggcgcacggcctcctctgcttcgggcgactgctcgcggtcttcctcgaccagttcgacgaacccttcgcctacggcggtcagcacccggatattctccccgtaacgggccgccgtgcggcggaacagatcgccgtccagactccgggccgtagccagcacccccactaccccactgcgggtattcaggcaggcgggcttcacggcgggttccatccccacgataggcatctgccgatatttgcggcgcagaaaatcgatggccgcagccgtagccgtattgcaggcgacgacgaccattttgcaaccggcaccaaccagccgtccgaccgcctcgtccgccagacggcagatctcatcggccggacgcgcaccatagggacaattcttaccgtcgcccagatagacgagcgactcctccggcaactggcggcggatctcgcgccagaccgtcaggccgcccaaccccgaatcatatacgccgacaggccggttatccatttcgttccttcagtttttcagtgataaattcgaggatttcgtcgtcgctcatcgcgccgccgtcgatcgtcagcgcagcctggccgtaaaacggctcccgctcggccatgttgcgcgacatgaattcgaccagctcccggtcgtcgagtcccctcaacttggggcgcttccaacgtccgtgaggactcaaacgcgctgcgatctgctccgcagaacggcggatataaaccgtcagaccggctccgttcatacgggccatgttgtccgcccagacgggaagcccgccgcccgtggaaaccaccaggtcgtcgcccgaagcgatcagctgttcgagcatcccgcgctccgccttgcggaaatactcctcaccggcgtaatggaagatgtcgcacacgtcggcaccctcctgtttctcgatccggtcgtcggtatcggcgaagtcgtaacccagccgccgggcgagccgacggccgatggtggtttttccgcaccccatgtatccgaccagaaaaacgatcatatcctaactcctaaaataaattcaactgctcggtatcgacgatcacctcctccgtgtcgcctttcggacgttcgatttcgaactcggcgtccgtaccctcgacggtcatcgtttcgggcaggtcgaaatccccctccgaatcattcggagcatcctccccggacagctccggccgctcgggtcgctccggctccacgaaagcgagcgtcgccacgtcgtaagtcgtaagacgcttgcccttggcccggtggctcttcacgccgacgaaaccgtccacgtcgatctcctccgccggacgcgaagcctgcgccccctggaaagtcagcaccagcacagcccccgggcaggacgtcacggccaccagatcggcatcttcgtccaggaacggctgcatcttttcgccctgctcggccgtaaagcgcttcagatagtagtaattctgcgagcggtcgaaataggccaccgcatagaccgtatcgggtgaatatttcgacacgtgaaccgtatcgtcgggaaagtgctgcgtaatgtcgaaattcgtcgtgtaatagacgttcttggccgtgcggacaatgagtttgtcatccccctggaactcaccgagcaatacgccccggccgtccgtattgagccggtgcacgtcttcgtcgtaccagatctgctgtcctccgagggtcgaagtaccccgctccttgaggacgatcttatggatgccgtaacgcgagaagaggttgccctggctctgccgccccttgatcgccacggtcgagaaatcgagatcgacgatcaccttcttcaaacgcggacgcggcttgaagtaaatcttcaacacttcggcctcaccgttcggattgacagacatatagaggatttcactcttcgggtcgcctttggtgatgttgtactccttgtcgcgcgtgatacccttgatggcgcagcgcttcatcaggatcgggccgttcttgccgtcgcggtagaggacgttgtagatcgtccgctcgtcgttgcgcttgaacaccccgatataatagatattcttgtcgaaaaaggctttgtcgctcaccttcgtaatcacatagcggccgtctttggtgaacacgatcacgtcgtcgatgtccgaacagtcgcacacgaactcggaatccttcatcgacttgccgataccgaagaagccctccacacgatcgacgtacagtttggcattggtgacagctaccttcgtcgcttcgatcgagtcgaactcgcgcaactcggtacgccgctcgcggcccttgccgtatttgtcgcggatacgttcgtaataagcaatcgtatagtcggtcagatgcgccagatggtgctgcgtctgggcgatatcctcctcgatctgccggatctcgttgtcggccttgtcgctgtcgtaacgcgaaatacggatgaacttcagctccgtcagacgctggatgtcctcggtcgtgaccgcacggcgcagcaccttggtaaacggttccaaccccttgccgacggctgcgtaagcctcctcgcgggttttgcagccctcgatgagctgatacaatttattaacgatgaaaatccgctccagagaagccgcatgccatgcttcgttgagttcgttcaggcggatttcaagctccattttcagcagctcgcgggtatgctccgccgaacggcgcaggatctcgctcacccccaggaaatggggtttgtcatcgcagatcacgcaggcattcggggcgatcgacacttcgcagtccgtaaaagcgtagagcgcgtcgatggtcttgtccgacgactcgtcgggcgcgacctgcacgatgatttcgaccttctcggccgtattgtcgtccaccttgcggatcttgatctttcccttctcgttggccttgacgatcgaatccttgatagactcggtggtcgtggtgtagggaatctcggtgatggccagcgtccgcttgtcgatcttcgaaatgcgggcacgcaccttgaccgtaccgccccgcagtccgtcgttgtagcggctcacgtcgatcatgccgcccgtcgggaaatcggggtacagcacgaaatccctcccctgcaaatgcgcgatcgccgcattgatcagctcgatgaagttgtgcggcagaatcttcgacgccagaccgaccgcgataccgtcggcaccctgcgccagcagcagcgggaatttcacgggaagcgtcaccggctcctcgttacggccgtcgtaggagcgcatccactcggtcgtcttcttgttgaaaaccacgtcgagggcgaatttcgacaggcgggcttcgatgtaacggcccgcagcggcttcgtcgccggtgaggatgttgccccagttgccctgacagtctatcagcaggtccttctgtcccaactgcaccagcgcatccttgatcgaagcatcgccgtgcgggtgatactgcatggtctggcccacgatattggccaccttgttgtaacgaccgtcatcgacggctttcatggcgtgcagaatacgtcgctgcaccggtttgagtccgtcctgcacgtgcggaacggctcgttccaggatgacatacgaagcgtaatcgaggaaccagttgcggtacatacccgtcagcttgcgcacgccgccctcctcggagagcaacttgccgtatttgcccgtcggagcggcggactcttcggccccgacactccccgcagcgtcatccgccgccgcaggaacctcgctgggcagatcgtcccgttccgtcatatcttctctttgttcgctcatagtctatgttctgttttcggtttcgcaccggcaccgcacaagaaaaccgcaccggccgacaagaaacggcggttacccgatcgccaggtcgctctccacgatatcctcctcgatacgcagattgccgataatgaagccctgccgttcgtaggtattcttgcccatgtagaactccagcatatcgtggatcgggtcgtccttcgtaagccgcaccttatccaggcggatatcctggccgatgaacccccggaactcgtcgggagaaatctcgcccagacctttgaatcgggtgatttcggcgttggcgccgcatcgtgcgaccgcccgatttttctcctcctcgctgtaacagtaatgcgtctccttcttgttacgcacgcggaacaacggtgtctgcaacacgtacaggtgtccgccgcggatcacgtcgggaaagaattgcaggaagaaggtcatcagcagcaagcggatgtgcatgccatcgacatcggcatcggtggcgatcacgaccttgttgtaccgcaggttgtccatatcctcctcgatgttgagcgccgcctgcaacaggttgaactcctcgttctcatatacgaccttcttcgtgaggccgaagcagttgagcggcttgccccgcagcgaaaaaaccgcctgcgtacgcacgtcgcggctcttggtgatcgaaccggatgccgaattaccctccgtaatgaagatcatcgactcctcggccagctcgttcttgtccgtcagatgtatcttgcagtcgcgcagcttcttgttgttgagcgacaccttcttggccgtttcgcgggctttcttctgaataccggagatcgccttgcgctccttctcgttctcgacgatcttcttttgcagaatctgggccgtctcggagtgcttgtgcaggtagtcgtccaagtgcttggccagaaaatcgacgatgaagttgcgcagcggaacccccggttcgatctccttcgagcccagtttgatcttggtctgcgactcgaacaccggatcggtcacacggaccgaaatggcggcgatgatcgacgtgcggatgtccgaaggatcgtaatccttgtgataaaactccttgatggtcttggcgatcgcttcgcggaaagccgcctgatgcgtaccgccctgcgaggtgtattgtccattgacgaacgaatagtaactctcgccgtaacccgtaccgtgtgcgatggccacttcgatatcctcgcccgaaaggtggatcggcgcatagagcggctcctcggtcatgttctcgcccagaaggtccagcaagccgttcttcgaaacatagctctgaccgttgaaacggaaggtcagccccagattgaggtaagtatagttgcgaatcatctgctcgacgtactccagattgtaggaatagtcgccgaacacctcccggtccacacggaaactgataaacgtaccgtttttctcctgcacgccgctctcccagcggtcgctctgctcgagcccctgcgcgaaagtcaccgtgcgggcctcgccgtcgcgcaccgaacgggcggtaaattcgctcgaaagcatattgacggccttgacgccgactccgttcagtccgacggtcttcttgaaggccgaaccgccgtacttgccgccggtattcatctcgctgacggccgcagcgagggacttgagcggaatgccgcgcccgtagtcgcggacagtcacaatgtcgtcctcgaccgtcacgtcgatctgcttgccggcacccatgatgaactcatcgacagagttgtccaccacctccttgatcaggacgtaaatgccgtcgtcggcctgcgagccgtcgcccagcttgccgatatacatacccggcctcaaccggatgtgctccctcggcgagagggtcacgatggcatcgtcgccatagctgttgctggtgttatctatctttttatcgaacataatcgtttatttctgtttcctgatttcggcgagccttacgcacatcgaagcccgcacctgctccatcagctccttcggatcggcagcggcgacccgttcggcgctcaccggcggcagaatacttaccgtcaatttattgcgccagttgaacatcccgttgcggccgatcatcgtggtcgtaccgtcgagcaccacaggcagaatttcaacgcccgcctcgcgcgccagcgtgaaagcccccgccttgaaacgatggatttcgccgtcgtgcgaacgcgtgccctccggaaagatcgccaccgaagccccgcgcgaaagccacagctttccgtcgcggatcaccttctccatcgcggccgtagcatgtccccggttgatgcagatatccccgtgcagcaaaaggaactggccgaaaaacggcaccttgaaaacttcccgcttggaaacccaccggaagttgagcggtacgaaatagagggtcggaatatccaggccggcctggtgattgaccacgataacgtacggtttgcgacggtcgatatactccctgccggtaacccggaacttccacagaggcggaactgcatagaaaatacggaccagtatccgggacagttcgtgcacgatcctccgggatttgtcgaaaggccacgtcaaaagcaacgccacggcggacaataccagaaaaaaagtgcagataacgaacaggaaaaggtagaataaaacgcttaacataaggtatggtcacaattatccacgataattcaaggaacaaaagtacaaaaatttatcgggtattttaaccgcgatccccgaaatttttatcaatacctccctgcggcaaaaaagggttcgccccacagccggataccccggaaaacggacactcccccgctccaaccgctccccgggcaagatccgaaaatcggtacgcatcttgtaagaatcgggcaataattatcatcggatatgcatgcattaaccattatttcggccatttttgtcatatcgggagtgctcgcagccatgctgatagctctcgacctcagacgacgtccccagcctatgagaatcatggacagcgtatgggtactcaccggattatgggccggaccgttggggctatgggcttacctcctgctcggaagggtgaaacccaacagccgtaacaccctgccgcccgaacctgcacaccacatgcgattaagacttccggacaaacgcgaaccgacggaaagaacacccgatatggtgatgcgactgccccacgaccatataccgcaaaacgggtccatgaaattgacaaccgcatcggaacaaggtatgcaaaccgacatttcgggaccgaacgcatattcgaaaagggggatcggatcgggtccatatataaaaaatacgaacaaggggccggattcaacgatggccgaaacggactgctacccgaaatggcgatcggtggttctctctacgctccactgcggagccggatgcaccctggccgatctgacaggcgaatggttcacctggatcgtcccgatttcgataggcggcagcctgatactcggaagctgggttctggattacctgctggctctggtcttcggcatcggttttcagtatgccgcgatccgaagcatgcaccgcatctccccgggtgaagcgcttatgaaagccggcgaagcagacttcctgtcactcacggcatggcaggcgggtatgtatggctggatgaacctcgtatttttgatattcttctccggtgacacgttgccccgaacagggtggaccttctggtttatgatgcagatagccatgctgtgcggattcttcgcagcacttccggtcaatcggatgctgatccgggaaggagtcaagcgcacgatgtaacttctgccgcgagcgattccgccggaaacgggatcttcatacctcgaacccgtataaccccgaaaaccagaccagaaaaacccgaaacgcggatattccgaaactttcacgaccatccgcaggctcttcacataacgcgatgcggcgatcttcttagatcgccgcatcgtcgttcacagcccggaatatcagaacttcacctccggtacggtctgcgcaccttcctcggccgcaaaataggctttctgatcgaagccgaacatgcccgcgatcaggttggcagggaaacggcgaatcgtcacattatactgccgggtcgcatcgttgaagcgtgtgcgggccacggcgatccggttttccgttccttccagttgggcttgcagctccaggaaattctggttggccttcaagtcgggatattgctccgcaacggcgatcagacgtcccagagccgatcccaccttctgctgcgcctgctgaaactcggccagcttctcgggcgtcaggtccgctgcatccagtttgaacgacatggcctgggcacgggcttcgaccacctcggtaaaagtagcctgctcatgcgcggcatagcccttgacggtattgaccaaattggggatcaggtcggaacgacgctggtactgcgcctcgacatcggcccaggtcgtattgacggactcctcggccgtgaccattctgttataggccgaacaggagccgctgatgaacagcaccacgagtacgaccactacgatccagataacttttttcatttttttctatcgttttttaagtgaatttccaaatttaccaacgggaaccggcaccaccgccgccgaagctgccgccgccgaaacctccaccgaagccgccgcccgaaccgtgtccgccgccgaaacctccgatccacatgccgccgcccctgcggtggttgttgttatcgctgcgcgcacttcgggactgccgcttcacgacgaaaccgcatttgccgcaacggtaagtgtcttcgaacagattataatgatccgtctgcccgacaaggttccgcgattgcagcaccaacgcgaaagcacgacaccggggacaacgtctggaacggtagaatccgaccagcatgacgcccagcggcacgaagacgaccagaaagacgatcaggaaaaccgcccacgccggcaaatcgtccgttgcccggaaatcgtcgttgccgcccgaatcgagctcgctgccctcaagcaccgatgccacggcacgcagccccgccaccatgccggcgctgtaatctccctcccggaaatacggcagcatgtaacgcatctggatccgcttgcaaagtgcatcgggcaagacgccttccagtcccggtccggtcacgaaccgcacttcccggcgatcgacgaccaagagaatgcccagtccgttgtccgaatcggcgcggccgacaccccattggaaaaaaagcgtatgggcgaaggagaaaagatcatctccgcgaatatcctccacagcgaccacggcgacctgggccaacgcccgatgcctgagcgaatagcaaagcgagtcgatctcggcgactgccgaaggggaaagaaccccgtcgggattcgacgtgaaccgataacggttgccgacctgcacgttgggaatctcctccacaccgtacggccgggctgccgaacccagaagcgggaacagcattccgaggcaaaatatcgtcagaattatttttttcatcgtcctactaaacctactaatgcaacttatattatatgcgcatttccgaaaccgggaagccattgccgcttcgcaaaacggcctccccgtcgccggcaaatgtacgaaaaaatccggcctatctacatcggccgtgtcaaaatccggaagctccagcccggcatccgctcatcgacatgcgagcagagctgtacgcgttcgcccgtcagggcgtccgcatagcctccggcgtagattcccgtatcgaaatcggcatgcacttcataaggcgacacgttcaacagggcgactacccgattttccggagtttccctcacgaaagtcagcagacaatcctcggcattgttgcggatttcgacgaaggagccgccccgctccccggaagcgagagccggagcatcgtgccgcaaagcgatcagccgccggtagaactccgtcgtttcgttcggctcgcaagcaggcagcgggtcccggtcgaaaaaggcgaaagagtggtcgtaaccgaactcctgccccgtgtaaaccaacggcagcgactgcggcagcagaaacgtcagggccgtcatgacccgcacggcaggccccaagcgggcgaattcgctcccgctccaggagttctcgtcgtgattcgaagtgaacatcagccgcaaggcccaggtcgggacgtgctcccgatcgacatagagatactcccgaatacgatcgacccggcacttttgctgcgccacgtcgttcatcaagtgataaagccgccaggcatacgacgcgtcgaaagcccggtcgaacaggtaatcctcctcggcttcagccagcagaaacaggtcgggtttcaccgcccgcaaccgccgtgccgcctcctgccaaaattcgatgggaaccagcatcgccatatcgcagcgaaaaccgtccaccccgtgttccgcaagccaaaaacgcatggcgtcgatctgtccctgccagacggcccgattggtgtaatcgagcttggccgtgtcgtcccacccgttaggaacgacgggtcggcccgaaacgtcccgctcgtaccagtcggacggacattccgcgagccagcgggcatcgcgcgaagtgtgattggccacccagtcgatcaggaccttcattcccagggcatgagccctccgaacaaaagcgtcgaaatcggccagcgtccccagttcgggattgacagcccggtaatcccgaatcgaataataggaacccagcgatcccttgcgaccgaccttcccaatgggataatggggcatcagccaaacggcatcgatgcccaaatcccgcaaaaaaccaagccgttccgcagcggcggcaagcgttccctcggacgtcgtctgccgcagattcatctcgtacaacacggcattccgactccacacagcattcatcatataatcaatcgtctcttttagcgttataaaatacagtaatcgcaaatatagcaaacaaaaacctttcccattcatatattttttctacctttgcataccaaaattacacgtgtactacaaaactatttcgaaatgaaacgaataaaggccttcgccctcctgctcggggtcgtcgttcttgcgtcatgcgcctcccagaagcgcgtgatctacctgcaagacactcaagccgacgagcaggtcaaaatcgcccaggattatcaaatacgcatcaagccgctggaccgtctgaccgtcgtggtcaacagccgggacccggaactggctgcgccgttcaatacatcgacctctctcaactccctgaccggaacgcctctttcgacctattcgtcgaacagtgcgtcgttacagatcaggaccgtcgatgaaaacggcgacctcgatatgccgatcatcggccccattcaatgcaagggcaagacccgcagcgaactggcccaggaaatcgcggacaaaatccgggaaggcggatacatcagcgacccgacggtcaatatacagttcgccgatatgaaaatctcggtcatcggagaggtcgcccgtcccggacagtacgacatcaccaacgaccgcatctccctgttggacgccctgtcgctggcaggtgatctgaccatctacggcgtgcgctccgacgtcaaggtaatccgggaggaaaacggcgtccgtaccacagcatctctcgatctgacttcgcaggacatttacgattcgccctatttctatctccagcagaacgacgtaatttacgtgaagccgaacaagtaccgggcccaggccggcgaaatcagccagaaccgcagtttctatatctcgctgatcagtaccgccgtgtccgtagcgactctgatcgtcacactcacccgttaattttcacaacaaggcatgacacctaacaatatcaacccgaactccgcgaacagcgatacaaagcaggaggaacacattactttctcggtgcacgatctgatccagacggtaatcgccaactggtattggttcgtcatctcggtattcgtttgcgtcggatgcggttacatctacattttacgcaccccgaaaatatacagccgcacggccaacatcctcgtgaaagacagccgcaagggaggggataccgacctggcgaccctgagcgacctggcgggcctgtcacagcgccgcaatgtggacaacgaaatttatattctccaatcgcgccgcctgatgacggaagtggtcaaacagctgggtttgaccgttcaatacgaaacgaaggacggattacgtccccaggatctctacgggcaaagtccgatcgcagtggagttcatcaacgataacgaccgacagggattccggttcgaagtttcactgcgtcccgacagcatcgtaaaactcaactacttcgaaatattcggtcccgacaaacagaaattcaagcaggaaatttcggccgtattcggcgatacgatctccacgcctgtcggccaaatgattatccggccgactctctatatgtcccccgattactacgaaaaggctccgatccgggtcaccaaaggcaacttgggcgtagtaacgcagttctaccagcatgaagtcaaaagtttcgtagccaacaagcaggcctcgatcatcaccatttctatgaaaagctccgttcccaaaaaagcggaagatgtcatcaatacgctgatcgcggtttacgaaaaagatgcgatcgacgacaaacgggggatcgcagaaagcacgggacaattcatcgacaatcggttggagatcatctccgaagaactgagcgaagtggaccgcaacatcgaaaagttcaaaaaagacaacaaaatatacgatatcgtatcggaagccgagcagacgattaccgaaagcgcccaatataaaaccgacggcctctcgctggaaaaccagatccgaatgacggaattcctcaaagaatacctgctggacccgaccaaaaccaatgaactgattcccggaacgctctcgatcaacagcccggcgatcaactcccagatagagggctacaataccgagttgcaacgctatatgaagctcaactccgagagttcggagaacaacccgatcattcagaatctcggcaacggactggcttccacacgccggtcgatcatcgctacgctcgactcctatatctccacgttgcagatccaactggctgctttacgaaaggaagaggcgctgaccaatcaacgaatatcctcggtaccgacgcaggaaaaacagattctggacatcgtccgtcagcagaaaatcaaggaggaactttacctctacctgctcaacaaacgcgaggagaacgccatcacgatggtcatcacggaaagcaactcgcgcacgatcgacagtgcatacggctccccgcgccccgtgtcgcccaataccgtgctgattgcgggaatcgccttcctgttcggactgggcatccccttcctgatcatctacctgatccagatactcgacaccacgatccgggggaggaaggacatcgaggacaacctttcggctccgttcctgggggatattccgcaatattcgggagaaaagcaacagggcagcttcgtcgtacgcgaaaacggccgcgatccggtgtcggaagctttccgcatgatccgctcgaacatgaacttcatgaacctgggcaagggagagataaaagttattatgatcacctcgtcgaatccccacgccggaaagacgttcgtttcgaccaacctggccatgacgttcgccacgacgggcaagaaggtcgtcatcatggacctggacctgcggcgccgcaccctctccaaacaaatggggcacggcggggataccaacggcatttccagctacctgtccggaaatacggagcttcaggcgatcatccgcaaatccaaactgtcggaaaacctcgacatcatctacgccggcatccaaccacccaacccgagcgaaatgctgttgagccagcggatggaagagttgaccgcagaactgaaactacgctacgactacataattatcgacagcaccccggcgatggccgtagcggacgccatcatcaccgaccgtctggcagatctcagcatttatgtagtacgggaaggcctgctcgaccgtcgtcagttgccggatatcgaacggctgtaccgcgaaaagaaattccataatatggccatcatcctcaacggagccagctcgacaaagcgtcacgggtacggttatggctacggctatggttacgggtatggcctcgacgaagaggaaaccacgacaaagaagggtttctggggcaaattatgcgaatggacacgtaataaatttcaaaagaaataaccgatatggccgttaaaggagcaatcatagcgatcgatttcgacggaaccgtcgtgacacacgcctatccgcatatggggatggacgcaggtgcggttttcgtactcaaggagctcgtggcgaacgactgcaaactcatcctgtacaccatgcgcagcggacaactactcgaaaaagccgtccaatggttcaaggaacagaaaattccgctgtacgccatcaacgagaatcccgggcagaagtcctggacttcgtcgccgaaagtccacgccgacctttatatcgacgacagtgcactgggatgtccgatccgctttatggacggcgtagcccgtccggtagccgactgggtgaaaatccgccaacaactggtagaagccggttacctggattaagcccgggtatttcacctgtcccggaatcacgaatacctccgaatcggagccggcggacaggtggtcgagagactaaacttcgttttagagaggctgacaggtggctggtaacaacaacgagcggcctttcaggggcatcgggcacagaaagcgaaagacgaacggaatagcctggtctttcgatcaggacttgggacgacacccaaacttgtaaaagccttctactcgcaaaccgacttcgtcgagtgcaggaaaaccaatcaaaatcgccgatccgtttggatcggcgattttccattaccggaccgacgacgatttgtctatcgccacaagtattcgggataaatccccgcccggatcatcttcttcaaattagcgaccaacaacggtttatcctccttataggtcacgccgaaccattgcgccggagaacggaggacccgaacggaagccgtgccgtcggcgatcagcttattgaccatcgacggaatgtaacactcggctttcaaattcccggcattctcctgcagaaacgaccgaaaaaaagcctcggagtgggcgaagtaatcgggagtaaagccgaaaagattcatcgacacgggcgtatcttcggccaacggttcatccccgttcgcaccgtgatcgacgatcccggccgccgtgcgttcgatctgcgtatgctcgaccattcccgtaagatcgccggcagcgtttaccgaacagacgccgcgcgacaccgtcccgttttcggaaagcgtccggctcaactcgtacgccaccatgcaatagcgtcccgacgctccatccaatccgcgaaggtattcggcgatggtacggaacgcttccgctccataaaaatcatcggcattgattacggcgaaaggctcgtgaacggcatccctcgccaccagaatcgcatggttcgttccccagggtttcacacgcccttcgggtacggtgaacccctcgggcaggcaatccagctcctgatagacatactccacgcggatcctgccaccgaaacgctcttcggtgaaaacctcctggaagtcggaagcgaaactgtggcggatcacgaataccaccttgccgaagccagcacgaatggcgtcatatacggaatagtcgatgatggcttcgttgccgggacctaccccgtccatctgcttgagcgatccgtaacgggatcccatgccggcagccaacaccaataatgtcggttttatcatactatattcagttttttactcgtttcaaagaaacgtacaaaggtaaggaaaccggcattaaattcaaagatttattgttacctttgtacaattcaactttccggcgcgaaaaggcaggaataccatcggccccgttcgatatgccggaccgggaaggcgaaacgaacagcccaggctttccgaccggcggaaacccctgcggtttcggcctaatcgcaaacaacgatcaaaaacagaatcatgaacgcatttcattccatatcctcgtggtggaaacgcttctcccgcaaacgccgcctgagcatgctcaatgcgaccgacaacgtcgaggagtggtacacccacatctccccggcaggtctgctcgccgagtttctggctttcgcgctgctgcttttcatcctcattctgtcgatcgtagcctatacgccggtgctggaactcctgcccggctaccgcgtcgaagcggcccgctcgcgcgagagtctaatgcaaagcgtcatccgtctggattccatggagcggatgatgaacgacatgattacctataacaacaacatcgccctcatcatggagggcaagactccggtggtgcgaaccgtgggcaaggaggacagcatccgcacgaacaagacactcgtggtgcccagccgcgaagattcgctgctgcgggccgaactggagggcgaaggtccttacagcctcgggcagagcacaggcagcggtaccgcacgcaagcccatcgaaatggtcgccccgatcgaaggcatcgtcatcgagcggttcgacatcaaacgcgagaatttcggcatccgcatcgccgcatcgcccgacacccagatcgtcgcggcggacaacggcgtggtggtgatgaatctctggacccccgaaacgggttacctgatcgaaatacagcactccaacaacctgatatcgatttataaaaacctgtccaaatcgttagtaaccaaaggacagcgaataaaacggggcggtgtcatcggatccaatacggaagtgctggccgacggcggcgacgccaaaattttcgaattcgaactttggagcaacggcaagcccgtcgatccggagagttatatcgtcttctgaccttcgttatgaaacaaagaatcgccttgctcggatcgaccggatccatcggaatacaaaccctcgacatcgttcgggaaaatcccggactgttcgagatcacgaccctcacggcccatcgcaactgggagcggctcgcccggcaagccgtggagttcgacgccgacagcgtggtgatcgccgacgaacggcgatacgacgccctgcggcaggcactcgacggcacgtcgatcaaggtatatgccggcgaggaagccctgcggcaagtcgtacagagcgggcaggtcgatgtagtcgtgaacgccctggtgggctacgccggcctgatgccgacgatagcggcggtcgaagcgggcaaaaaggtggcgctggccaacaaagaaacgctggtggcgggcggctgttacgtgatgccgctggcggcccggcacaaagccccgatcgtcccgatcgactcggaacactcggcgatcttccagtgcctgacaggagaaaagtcgcccgtgcgacggctgatcgtcacttgcagcggcggagctttccgcgaccgcagccgcgaggagctgactcacgtaacggtggaacaggcactgaagcatccccaatggcggatgggcgacaagatcacgatcgacagcgccacgctggtcaataaaggattcgaggtgatcgaggcgcactggctgttcggcgtaccggccgaacggatatcggtgctgatacacccccagtcgatcgttcattcgatggtcgaattcggcgacggagcgatcaaggcccagctgggatcgcccgacatgcggacaccgatcgcctacgcgctcagttttccgcagcgcctcgaccgtccggtggcgcctttcagctttgcagagcaccccaccctcaccttcgccgaagtcgatcggatcaaatacccggccctcgacctcgcctacgactgtctgcggcgcggcggcacggccggctgtacgatgaacggcgccaacgaagtggccgtggcagccttcctcgcccgccggtgcggttatctggagatcgtgcgcagcatcgaatacgcactgggcaaatcctcgttcgcagccgtgccatccctcggggacctgggcgcagcgaacgccgaagcccggtgtctggccgccgaatacctgcggctctgattatcggcaaaaaacattcttacaataaatgttttcgacaggtaaagacagaacgggtttcccgccgtacctgacatagaaaacaaactgaaaaacgaacgcttaagcaatggatattcttatcaaaatcgctcaactttttctctgcttcacgatcctcgtgggcattcacgaactcgggcacttcctgatggcccgggctttcaagatccgcgtcgaaaaattctacatcttcttcgacccgtggttttcgctcttcaagttcaagcggggcgacacggagtacggtctgggctggctgccgctgggcggctacgtcaagatcgccggcatgatcgacgaatcgatggacaaggaacagatgaaacagccggtcaaacccgacgaattccgggccaaacccgcctggcagcggctcctggtaatggtggccggcgtcatgatgaacgtcctgctggccatcgtcatctactgcgccgtttgctacacctggggcgactcctacttttcgaaccaggacgcgaaatggggctataatttcaacccgacggctcacgaaatgggcttccgggacggtgaccgtttcgtgtcgatcgacggcgaggagatcgacaacgtcatgcgggtacaaaacgacctgctgattaccgacggcggccgccgcgtggtagtcgaacggggcggagagccggtaacgctcgacattcccttcgaatccctgctccgtatgcggcaggagaaggcttacgaggacctcttcaccctgcggctccccttcatcgtggacagcgtatcctacacctcggcagtcgaagcgggcctcgagtccggcgacgaagtggtagcgatcgacgatctgcgcgacgcggactacccccgataccgcgactacctgcaaaaacacaagaacgacaaggttctgctgaccgtccgccgcgacggtgcgctcatcgattcgctcgcactgcccgtcgatgccgaaggacggatcggcgtgacggtcacgaatccctattcgctccgaacacaatattacacattctgggagtccatcccggcaggtatccacaaggccggaaagacgatttcgagctactgggaccaactgaagctgatcgtgcagcccaaaaccaaaatgtacgaggaactgggcggattcgtggctatcggcagcatcttccccagcagctgggactggcatgacttctggctcaagaccgccttcctgtccatcatcctcgcggtgatgaacctgctcccgatcccgggactggacggcggacacgccctgttcaccctgtgggagatcatcacgcgccgcaagccgagcgaaaagttcctcgaagtggcccaatacgtcggcctgatgattattctggcgctgctggtctatgccaacggaaacgacatttaccgattcttcatcaaataacgccgccatgaacgaaacattggaacgctgccgccggaatctcgtccggcgcggattcgaagcccggatcgccgcaacgaccgaagaggcccggcaaattctgtgggaaaaaattcgggccgccgccccggaaacgatctgtttcggggattcgatgacgatgaaagccacgggtattgtcgatgacctgcatcgggacggccactaccgcctgttcgacggtttcgaccctgcgatgcctcggccgcagaagctggaaatccggcgccagggcttgctggccgatctcttcattaccggtataaacgccgtcacggaagacggtgccctgctgtggctcgatatgatcggcaaccgcatcgccccgatcgccttcgggccgcgcaaagtactgctggtcgtgggacgcaacaagattacaccgacccgcgaagcggccgaagagcggatccgcaccatcgcggccccgcagaacatagcccggcatccgggattccgcacgccctgcgccgtaacgggtgtctgcgccgactgctattcggaagaccgtatctgcaacacgcacctgcggatggaacgctgttttccccgcaagcggattaccgtggtgttgatcgacgaagacctcggcttgtaaaggcccctgaagagaacgaaaccgaagattacgattttctactgacgatatgaacgaaacattcgaacagtgccgcaagaacctcctccgcagaggattcgaagtccggatcgccgcaacgaccgaagaggcccggcagatcctgcgggaagagattcgggccgccgccccggaaacgatctctttcggaggctccatgacgatggaggcgacgggcatcgtcgatgagcttcgccgggaggggcgttaccgcctgttcgacggagtggattacaccttacctcccgaagaacggatcgagatccggcgacagggtttgctggccgatctgtacatttcgggaatcaatgccatcacggaagagggggcgctctattggctcgacgggatcggcaaccgggtagcggcgatcgccttcggcccccgcaaggtgctgctggtcgcagggcgtaacaagatcgtggcgacacgcgctgcggccgaggcacgcatccgcgacatcgcggcaccccggaacgtcgcccggctgggacagaaaaccccttgtgcagcgacaggcgtttgcgccgactgcgactcggaagggcgcatctgcaacacgcatctgcggatggagcgctgctttccccgcaagcggattaccgtgattctgatcgacgaggaaatgggattataacaaggaatgcggatgcccgtcgcggcagcatcggcactccccggaaaaacgatacgacatggcaaaggtcaagaaagcattcttctgccgcaactgcggcttcgaagcccccaaatggttgggacgctgcccctcctgcggggaatggaacacattcaccgaagaggtgatcgcccgtgaaagcggcggcggacctgcgactgtcgccaacctgcccaaagcccgtccgcagcgaatcgccgacatccacgaaagcgaacaccgccgcatcgacctgggaaaccgggaggtgaaccgcgtgttgggcggagggctcgtgcccggctccctcgtgctgctcggcggcgagccgggtatcggcaaatcgaccctcagcctgcaaatcgccctggcggacaacggcctgaaaaccctctatgtttcgggcgaagagtcggccgagcagatcaagatgcgggccctgcgtctgggcatcggcaacgaagggtgtctgatctatgccgaaactctgttggaaaatattctggcccagatcgaagagcaacggcccgacctggtggtcatcgactctatccaaaccatctataccgacatcatcgaatcgtcggccgggagcgtttcgcagatccgcgaatgcgcggcatcgctgctcaaatacgccaaagcgaccggaacgtcgatcttcatcatcggtcacatcaccaaggacggcacgatcgccggcccgaaaatcctggagcacatcgtcgatgttgtactccagttcgaaggggataacaacctgatataccgtattctgcgaggaataaagaaccgtttcggagctacgttcgaaatcggcgttttcgagatgctcgacgcagggttgcgcgaggtggacaatccgtcggaaatcctgctttcgcactacgaaaccccgctcagcggcatcgccgtaggagcttcggtggacggcatccgcccctacctgatcgaagtgcaggcactggtgagcaacgcggcctacggcactccgcagcgcacggcgaccggttacgacaacaaacgtatgaacatgctgctcgccgtgctcgaaaaacgcgtgggaatgaagatgttctcgaaggacgtattcctcaacttcgccggcggattcaaggtcgccgatccgggactggacctcgcggtcacggcagcggtgatctcctcctactacgatcgtccgatcggcgaagggatctgcctggcgggagaaatcggcttgtcgggcgaagtgcgccccgccccccgtacggaacagcgtatcagcgaagctgcccggctcgggttcagacggatcgtcgtgtcgggctacctgggccgttcgatcaaaaaacccaaaggtatcgaaatcgtcacgatcaacagcatcgaccaactgccgcgtgccctgttcgcggaaggataggcagaattcccggtatcttttaaaaacttgcacgagaagccccgatgataactcatcggggcactatttttggtacttccctcaaaaaggaagagttcttcgagaaacagatacggcacctgtcattcagaaaaggattcgaaaatcggcaaaaacaaaaaataccgcttaaatatgaaagatttcgataagataataggtcgcaacgcgatcacgatgatctattttttcaccagtcaatgcgttccgtgcgaagccatggagcctgcgctcgaccaattcgaacgccgcatggccggacgcgtggacatctaccggatcaacaccgacgcggacgagaatgcctacctgctctaccgttatatgatccgcacgacgccgacgctgatctacttccgcaaaggggatgagatccgacgctgcgaaggcccgctgacctataaggaattgctggcgctccaggaacaggtcgaaacagtcgaacacgtctgcctgaattagtactccagccgccaggtcatctcctcctcgatgtaacgggccgtttttcccggcccgagcgaagagaggaatatttcgatgtcccgccgttgtacggcgggattcgtcatgatcgccgccagcagcgccacgacaccctgcgcgaccaaattcgattcggggtacgtcacgaccagccgccggagcaccgggaccaaggaactgaaatcgggatgcggaatacgggaaagagccaacaagccggcatacccgagcaattcgttccccgtatcgcaccaggctctgccccactcgtcgccgcgcggcgaccgggacatcagcgcgaaggcacactcttcggccatctccgaattggcaataccttcgccccagtcggaaaattcgacggaagtcacctgcacgggatcggcgatccagaaagcggccaatttcagctcccgcacatcctgccggtagaggaaacgggcaaagtcggaatcgggccgctcggctcgcgcgacagcacggatcgtcggcaggctcacaccgtaattcagtccatacgctttcccccgatactgcatcgtatcggccaccacgccgttccgctcccggcgaaaacgccccaacagggcagccatccgcgacgtataatccattggtttagcggtttctgggaacctgaagggctatcgtacggccgaactggaaaacgggcagcacctgcgcggcctgctcctgcccggcagcgatgagcgaacagcgcgtgagagcggcaatacggtacggaatcgtagaggaagtgggacgcacaccggcttcatcgacagccataccctgcggctcgtactgcaacaggacgatatctcccgtcaggtcgttggccggcaacaaccccgcatcggggctgaaacggcagacgatctgctgcaatttaccctcggcgggcgtcacgcggaaacggcgggtttcggtcgtcactacacgtcggccgaggaagagctccagatactcctgctccagccggtcgagacgctccaacgccacaggaagtcccgcaccgaagacattctctccagcctcgccgctaatcaggtcaagacggtgtttacgcagcgaaaaaatcgcggcggcggcatttcgggcagcggtttgcagatcgggttcggtcatgtcgaggcggtcggtctgcaaccgggcgaaatcggccccctgggcctcgtaactctccacccgacaggtcgaagcgggcaattccccggcggtcacgtatcgctcgcccggcatcagcgcaatggcggcatcggcgaccgtatagacagtcttgtcggtaagcggcgcacgcagaccgaggaacttctgggcatagcgggcatagggaccgcagacgatcttctcgcaacgcaccgtaatatcggccgcaagaacggtttcggccgtgccgaccacgaactcgccgttgtccatataggttcccaatcgggccatatcctgattctgggccgcagccgtcatcccggcgaaaagcagcggaagcatccataacattctcttcatattcacggaaaattttaatttatgcaaatttatacgaattgcccgtataatcaaaatttaaggtagaaatcccccgtcagacggcggtaatcctccgtataggagtccgagccgccgagttcgatcacgagccgcgaaggttccggcggcggtacgggcgtcgtgcagaactccgcaaggatacgccgcaccccgcgccggggcgtagaataaacctccgtccagcgaacgggatagagccgcccgagagccgccgaacggaatcgctgcatctcgacgggcggcaacaccaatgcaaagcgtccgccgggcgcaagcagacgaacgacagccgccgcaagctccccgaacggcaatcccgccgcatggcgggcggtgttgcgcccttcatcgggcgaaagcagcgaatcgacgtaataaggcggatttgacacgatcagatcgaatctttcaaccggatcgtatcgctgcaccgcgacggctactgcatccaaacggtccgcccagggcgacgcggcaaaattttcagccgcctgcgtcgcgcactccgcatcgacgtccaccgccgtaatccgggctgcactccgctgggccagcatcagggcgatcaggcccgtgcccgtacctacgtcgagcatccgccggtccccgggacgtacttcggcccaggcaccgagcagcaccccgtcggttccgaccttcatcgggcagcgatcctgccgcacggcaaactgtttgaaccggaacatggctatccttttagaaaaccgtccataccggcgccgaacagcgcgaaatcataacgcacgggatcctccgggtcgaacgtgcgaagcacggcggtaacctcctcgacggcccgccagtcgttctgccgccggacaagcaatcccaaagctcgtgccacgttgcccgaatgaaggtcgagcggcaggtagagcgccgacatggggatcgagcgccagagcccgaaatccacgccccgatcgtcacggcgcaccatccagcgcaggaacatattcagccgcttgcaggccgagcctttgtcgatcgacgaaaggtgcttctccgaacggatcgggtgcggctcggcgaaaaactcgcggcgaaaatcggagagaacggacgggatcgagcccgtggccgcataacgcccctcgaagaactcgcccagactgccgtaacgacggaaaagcgaacgcagcgcccgtacataagcgatcaggtcctcgccgttgaaggtccgatgcacgcagactgtcagcttgcgaagctcctcctccgaagcatttttcacgaaatccgcaggggcgttgtccatatacgacatcatccggcaggcattgccgacgatcgcgcggcggttgccccaggcgatagtcgccgagagaaagcccgcgatttcacggtcttcgcgcccctcgaaacgatgcggcacgctgatcggatcgggagcgatgaactccgtccggttgtagcggtcgtacagggtttcgagcaactcgcgcagcggttcgaactccataagaatcgtgtaaatggaatctactaatttcagaacagtcactcccgtcactcgggaaggatcagaccgtcgctcattacgatccgacggtcggcccggagagccagcgactcgtcgtgagtcaccagcacgatcgtctgccccaagcgttcgcgcaggtcgaagaacaggcggtgcacctcctccttgttgcgggtatcgaggttgcccgaaggttcgtcggccaacagcacggcgggagaattcaccagcgcccgggcaatggcgacccgctgctgctcgccgcccgacagctcgccgggcttatgatcgcggcgttgggtcagccccacgagcgccagcagctctccggcacgccgctccacttcagctttcggacgccgtccgatcaggccagggatacagacattctcgaaagccgtaaattcgggcagcaggtggtggaactggaaaacgaatccgatcttctcgttacggaaccgcgacaaagcccgatcaccgagcgatgaaacatcctgtccgtcgatctcgacgctgccacgatccgctttggaaagcgtacccagtatctgaagcaaggtcgtcttgccggcgccgctggcaccgacgatcgaaaccacctcgccgcgcgacacctcgagcgatactccccggagcacctccagcgcaccgtaactcttatggatatccgtagcttttatcatgggcggaatgctttgaaaatacgtaccgtatcgaccgcttcctgcacatcgtgcacccgcaggatcgcggcaccctgcctcaaacactcccagcccagagcgatcgtcccggcgagcgcccggtcgggcgtcgtatcgagcactttatagatcatggacttgcgcgacactccggccagtacgggatagcccagcgagcaaaggttgtgcagcccccgaagcagatcgtagttctgttcgagggttttggcgaacccgaagcccggatcgaaaatcaaccgacgcacgccgcagcgacgcaactgctcggcacggagccggaaataggaaacgacctcctccaccacatcgcggtaagaggtcatcccctgcatcgtcgcaggagtaccccgcatgtgcatagcgatatagggaacgtcgtactcggcgaccacatcgacgatggccggatccatctctccggccgagatgtcattgacgatcaccgggccgaatgtttcgagcacccgccgggccacctcagcacggaacgtatcgaccgaaacgggcagtgtgggagcgatccgccgcacggcggccacccccgcttccacacgacgccactcctcctcgggcgtcacctcggcggctccgggccgggaggagtagcctccgacgtcgaacagatcgcaaccggcatcggccgcttcgcggacacgccgttcgatagcctcggcatccggtgtgcggctgccggcgaaaaaggagtcgggcgtgacattgacgatcgccataacgcgcggcgtggtcaaatcaggcagaatgttttcggttttcatcgcgtaacaatttatccagacgggcaacctcgtattcgagctccccgagatttatattgacaagggtatagtcggcccgccggcgcaactcctcttcgtcgagctggaccgcgatacggcgccgtacctcctcggccgaagccccgtcacgcaggcaggtgcgtgcaatacgcacgtcgataggagccgtgaccgcgatcgtacggtccacatacccctccaatccggcctcgaaaaggatggcgctctccaaaaccacatagtcggcgccggactgccgcccgcaccaccgttcgaaatcctccatcacggcggggtgcaccagcgcgttgagcgccgaaagctccgcaggatcggaaaagacacggccggccagcaacttgcgattcaaacgtccgcccgcatagacctcctccccgaagcgtgcggcgagccgcctccgtaacggcccatcctcctccataaggcgtttggcctgcgtatcggaatcatagacaggggcgccgcaagcggcaaaaagccggcagacggtcgatttaccgctgccgatacctcctgttatacctaccttaatcatttttcttgctgacggggatccggaatttcgggaaccgatccgacggagatgaccttgatatcgctcaaccggacggaaatggcgttgtgcagagagagagaatctatcttcaggaatttctctccgtcctcggccttcacggagcggaatttcaactccgacaggggaatccggagccgcttactcatatagactcgatagccgaacaagttggtaccgactccttccaccacacaggaaactttgaaacgctcgccgtccacattcacggtgaagggctgctcggtcgtataggtatagttcaacttggcgatataccacaggatgaacgacgcgacgagcaaagccagaaagaccggagatacataacgacgcagccaaccgaaacgctccatgacagacaatttttaagtcaggcaaagttaaaaataaaataggccgcaacaatacgttgcagcctattttattcaaaaagcggacctttatttcttgccgaggccctcgcgcttcatcagaccgtaagcgatcggagtcgccacgaacagggtcgaaagcgtaccgacaaccacacccaaagccaatgcgaagataaacccgcgaatcgtctcgccgccgaagaagaggatggcgagcagagtaaccaatgtcgtacccgacgtattgatcgtacgcgacagggtcgcattgagcgcattgttcacgttctcgcgcagatcgcgcttgggatagagcaccagatattcacggatacggtcgaaaaccaccaccgtatcgttgatcgtataaccgatgatcgtcagaatcgccgcgatgaaggcctggttcacctccaggttgaagggcagccagccgtagcagagcgagaagacgccgatcaccaccagggcattgaatgccagcgcggtcgtagcgccggtcgcatactgccatttcttgaagcggagcgaaatgtagaggccgatggcgatcagcgagaagagcaccgaccaaatagcgccccaagtcatatccttggcgatcgaaggaccgatcttgtctgccgtaagaataccgttgatatcgttttgcgtattgcggaaattctcgaaggtgatgggataaccgtacagaccatgcagcgcgtcgtacagaatccgatccacttccgaagtagcctcgtccgaagtgtcgtcgtacttgtactgcgtcacgatacgcatctggttctcattgccgtactgcttcacctcgaagctgacattagcggcatcctcgtaaccggagaagacatcctgcaacttcatacgtacctcctctgcctgtaccgggcggtcgaaacgaatcacgtatgcacggccgccggtgaactcagcacccatgttcagaccgcgtaccgcgaacgaaacgcacgaaacggccaaaacgacgatcataacgatgtaggagatcttactcttgcccaggaagtcgaaatgagcgttgcccataagattctccgaccacttgcgcgagaaggagatctttccccatttattgactacgccctcgatcagcaggcgggtaatgaagatcgaacagaagagcgaggtcagaataccgataatcaacgtagtggcgaaaccctgcaccggaccgtttccgaagatgaacagaacgataccggtgatgatcgtggtaaggttaccgtcgatgatcgcggagtatgctttcgagaaaccgtccttgatagccaggctcaaacccttaccgccgcgaagctcctccttgatgcgttcgtaaataatcacgttggcatccacggccatacccatcgtcagcacgatacccgcgataccgggcagcgtcagcacggcaccgaacgaaaccagaacaccgagcagcaggaatacgttgcacaacaaggcgatatcggacaaccagccggctgtcttatagtagaggcccatatagagaagcaccagcacgaacgcgagtacaaacgaaagaatacccgcattgatcgactcctgccccagcgacggacctacgacggtatcctgaataatacgtgccggagcgggcaccttacccgacttgagcacgttggcgaggtctttcgcctcctgaatggtgaagttacccgagatttccgaacttccgccttcgatcttctggcgaacgaccggagcggaatagacataaccgtcgagcacgatggcgatgcagcggccgatattgtcgcccgtcagacgcgcccagtcctgaataccttccgagttcatcgacatcgaaaccttggcttcggcaccgcgctcggcataggtttcacgcgcatccacgatcacgctgccgtccagcggagccttgccgtcgggcgtgctgaccttgagcgcataaagagagaaacgcccgttgttctgcggttcgcccttgataccccactcgaaacgaacgtccgaaggcagcaactcgcgcacggcatccatacgcaggtagccggcaacggtcgccgtatcggcaacggctacggaacccacgacagcgcctccgccatcatagggattgagcagcgagaagagcggattttcctcgcgggtatagcgggatgcccccgaagccgaggcagcctcctccgcagccggagcattgttctgcacctctgcgatcaggctttcggtcgtatcttcggtaccggcagcagtcggctgctcctcagtaagcgtttcctccacggccgcatcggtcgccccggcagccaattcgtcgcgcaaaagctgatcggcctgctccagggcacgcaccaactcggtgttattataagtcgtccagaactcgagcgaagcggtaccctgcaacagcttgcgtacgcgctccggctccttcacgcccggcagctcgaccagaatacggtgcgaattgggcaggcgctggatgttgggctgcgtaacgccgaaatggtcgatacgactgcgcaggatgttgaacgaagcgtcgatcgcagcgtcggtttcctcctgcaagatcttctcgacctcgctgtccgagctgttcggcgtgatatccttacgatccggacttacgaaaagcgcagccagcggagcaccgccggaaacctcacgataagccttggcgaactcgccgatgtagttgttggtaccctctttaagcgccttgttggcacgggcgatggcctcctcgaacatcggatcgtgtgcgctgtcacctgccagggctttcagcacgtcctccacctgcacctcgagcatgacattcataccgcccttcaggtcgagacccaagttgatctccttctccttgacctccttgtaggtgaatgaaatgaatccgagatcataaacgggcctgttctgcacggagtccaggtaatagatctccgccgcctgacggagcgaatccgactccgaaactttcgcggcatactcggccgcctttttctccacgcttctcgctttcagtgagaaggagagctggtagatacaagcaatcgccagcaggattgcaagtaacttgattacgcctttactttgcattgggtataaattagtttgttataatttgtttgtttcttttccgttacccgaaacgggatttcagaaatcccaataaacgcacaaaaatagaaaaaattgcgggaaacaaaaaaggaatagacaaaaaaacgctggaaaccatccgatttcaccgttgaaaccgaaaatcgaaggagtgcgatttcatttccgggcggcaccccgacagcaaagaccgcacaccggacgcgcgggaaaacaccgaaggagtccgaccgtcccgaccggcaacaagggcgctgaaaagcggtatcgaagcacctgttccccgaaaccgcagcccgcaatccgccctacagacaaaaaagccagggccgacatactgccgaccctggctcttctaccggaaagtccgcaaaccgaaccttccctccaactttttatttaacctcttcgaactctacatcttcgggctgattggatccaccctgctgctgaccgttcgtaccggctcctgcatcggcatggggagcaccctgctgggcaccgccctgctgctgttgcgcggcatagatatcctgcgaagcagcctgccatgctgcattgagctcggccaaagccgtatcgatagcggctacgtcagcgttcttatgcgcttccttcaacttgcccagcgccgtttcgatggcagccttcttgtcggccggcaacttgtcgccgtactctttgagctgtttctcggtagcgaagatgttcgaatcggcggcgttgatcttgtcgatacgctccttctcctctttgtccttcgcctcgttagccttggcttcgtcgcgcatacgctggatctcctgctcggtaagacccgacgaagcctcgatgcggatcttctgctccttacccgtacccttatctttagccgatacgttcaggatgccgttggcgtcgatatcgaaggtcacctcgatctgcggcacaccgcgcggagcggccggaataccgtccaggtggaagcggccgatcgacttgttgtcgcgggccagcggacgctcgccctggcagacgttgatctccaccgaaggctggttgtcggccgccgtcgagaagacctcgctcttacgggtcgggatcgtcgtattggcctcgatcagcttggtcatcacaccgcccagggtttcgatacccagcgacagcggagtgacatccagcagcagcacgtccttcacctcaccggtcaggacaccgccctggatcgcagcgccgatggcaacgacttcgtcggggttcactcccttgctgggcaccttaccgaagaaatcctcgacgaccttctggatcgcgggaatacgggtcgaaccgcccacgaggatcacctcgtcgatctgcttggcatcgagcccggcatcacgcagagctaccttgcaaggctcgatggtcttgtggatcaggtgatcgcacaactgctcgaatttggcacgcgtaagcgtcataaccaggtgctgcggaataccgtcgatcggcatgatgtacggaaggttgatctctgtcgtagtcgaagacgacaattcgatcttcgccttctcggcagcctccttcagacgctgcaatgccatcgggtccttgcgcagatccacgttgtgttcggctttgaatgcctcggccatatagtcgatcaacacgtggtcgaaatcgtcaccgcccaggtgcgtatcgccgttggtcgatttcacttcgaacacgccgtcgcccagctccaggatcgaaatatcgaacgtaccgccgcccaggtcgaagacagcgactttcatgtcattgccttttttatccaaaccgtaagccaatgcagcggccgtcggctcgttgatgatacgacgcactttcagtcccgcaatctcaccggcctccttcgtggcctgacgctgcgagtcggagaaataggccggaacggtaatcaccgcttccgaaacctcctgccccaggtaatcctcggccgtctttttcatcttttgaagaatgatcgccgaaatctcctgcggcgtgtactgccgtccgtcgatatccacacgcggcgtattgttgtcgccgcgtactaccttataaggagcacgctcgatctccgactgtacctgatcgtaggtctcgcccatgaaacgtttgatcgagaaaatcgtacgtttaggattagtaattgcctgacgtttagccggatctcccactttacgttctccattgtcggtgaatgcgacgatcgaaggagtcgtacgatgcccttcggaattaggaattacgatgggttcgttaccttccatcactgcgacgcaagagttcgtcgtacctaaatcaataccaataatctttgccataatatcgttgctttatagtttaataatttctttttcagctccgcttccacagccctgccgctgccgtgcggacgatcgtttagtgaacaaaggttgtaccaaatgttcttttcgcaccatcctgcttttccggagcgtaaaatctgacaaaccgccggaaggactgacattccgactgtcacaatggcagcccgaaactccctttcggacatcgctgtcattccgcagcctgcctgcccccgatccgcacgacgatacggaatgcaacagaaaaccccggcctctggagccggggtgccataatcggggattccgatcctatttttcattcagaatacgcatcgccgcatccaggatcgtcgtatcgtccaacgtcacaacgccgccgtcgggcccttgttcgatatgaatgcctacgccttccttcgcctcggggtgccgtccgccgaaataattacgaaccgaatcgaccgagattcccaattcgtctgcaatccgttgcgagctgccgctgggcagtctgtccttgatacgacgcaactcattaaatgtgataatcatactgctaattatttaggttgaatttatttttcgtcttctccgcttccgacaaagtccgaccctgttcggcacccatttgtcggcagaccggagatggcctctttttctttcctctaaattaaatccttttccgataatttcaaaattttccggaacaaaaagttgaaaaaatcgtcaattacacccaatttaccgacagaatccgtcttacaatcgaaatgttccaaatccaatgccgggaatgagtcgggaatgaaaagccccgcagccaaaggaataaaaaccgaagccgcccgcaggaatcctgcagacggccagaaaacaaaaccggcaacggactattgagccggctcgatataaaattcgatcaacagcggcgtatagggcaaaacctcggtgatcgtcgtactggtcgatgtggagttgtccacgtagtaaggattatagaccgaaccgccgtaaagaccgttcatatagctgccataataatcgtcgtaatagttgcccatgtaattattaccgtagtaattgttcatcatgccgtaataattcatcatagcgtacgtagcggcgtaattcgtagaagaactggtctgggttgtcccggtaatgccgaccacaccgtacgcattgctcgaaacggtcagcaaagcgccccagcttccgtagcggaagtgcggcaaggcgtaataccaggccagaatctgtttgtccttattcagcgaaggagtgtagctcatgtacgtaccggtggattccacctcgccgtaaacgattcgtttcacctcgtcgatattggtactctgtacgaacccgtccaggaatcgggcgatgtaccagacccggacattcttctcgggatcgatcagttcgcccggttcgtccgtaccgaagcgctcgaccaaagccttgttgatcttacgatcgatctcgtccgccttctgctgcgatcccacataaacattcgaataggtgaaaagtccggtcgcatcgtccgcaggattgaaactctcgttcacatagatttgaggcgcctccgacgtggcgattttccaacgatacgacgaggccggctctccggctttgaccgaagccgtttcggaatcgtcgtcctgcggaggagccgtcgggtccagtccgccgttcgccgccgcaaaatcatcgaccgcgacgctctccgtttcaatcggctgactcgatcttccgaccagcttgatccgggcgatcatcgggtggttggcactcaatgcatactgcccctcgtaacctccgtcgccattggcttcggtggatatgatcgtcgcaggcatatacagcacgacctcggcccccacgcgcaattcgacctcacggggaaatcccttctgcgcggcatacgtttcacccagcttcaacgggttccgcatagccagataagtcccctccttgaaagttccgctcgccagctcaccgtagaactgatagtaaggaacgtaatgtgtataaggagtaaaagttccctgctgaagcgcataaacggaatcccgggccacactgatattcccctgcaaatcccgccccgtgatatcgtaccacacccagctctccgtctccagaatcgcactgtccgccagatcgcccagcgaaatgacatccacgtaatactccccttcctcctggtaattctccagcagatcgggacgattctgcgtcatccaggctttcagagctttgttctgggtattccccggataagcattgtcaggctcctcagcgcaggagcagagcgtcgtcagaccgaaaaggagtatcgcaggcaaccaacgtcccatactattcattgttttcttatttacgaaccgaatcaatcgtataaaaaacggcgatcggactctgctccggaatgaaattgatcagcgcatcgccgtaagccatattgtatgtcatatatacttcgaccgtatctttctcgcggcagcccggcagcgacaattcgaccccttcgacgaaagaaccgccgcccacacggacgggacggggttcgaaactccagtatttcgtatcgagtccctgctcctgaagtttttcggcccactttctgtcgttggtgtagatcggcatcgtactcgcagtgattgcccgattctcgaacagatagacccagaaaacaagatccacctcatcgccgatctccgcttcaggacgcgtctgacgttccgaatcgtaataatggtaaatatatcgatacgaccagcgcccgaacgtggagtaaaaatcgaggtcttcatccgaactcatagcctcctgctcggtcaccagacggggctggtggctaccggaaaggaaactctcgaactgctgctgctgttcgggaagaaccttgtcatcctcgccgcagccggtaacaaccagcaacgcagcaagcaaaatatggaaacggattttcgacatacaatcgcgcaaatttaacaaatcctgcgggacttgcaaaatttaccgggcttcattcttcgttttcccgaccgacatcgctcggacagtcccgaagtccggaaacccggaatcattcgcatcgcgtccccggcccggcaactccacacaccgaagcccgcctcgcccgccggtgctcttcttaacaatacggcagaccggacgattttagtattcgtacagagataaaaaacgacgattacaccccgaacgtatcgcggctcggctatacactgcatcgcttacggcggcgataccacgcccacacaccccgcgaaccgcgattgcaaatccgctgcagcgactgcgaggccggatgctgccaacgcagacgccgcagtcagcccccccgaaaaacaatgtttccctctctggcaaagaaacccgacggtccggcgaccggttttcctgcgctcccgacacagaaccggagctgcacacgaaagcccgcgtcgcgacaaaacgatataaagtccgatcttccgaacgttcggaccatccgaaacgtccggaaacgaaccgaacaaaaaaatcgactgccggagcgattctttcgctccggcagctccaataacttttttacaaaacaaaatcagactctacgctgtccgtcctgaagccactccctgcgatgcctcttaacggcacatacgaccagggttatgatgaccgataaaacaacaagaccaaacataaggccgacaaagcctgcaaatccttccatttttacgataaacattttgggggttcgtttactcttttcggcgcaaaactaatataaaaaaaagtttcaaaaatattaaatcgacaaaaacaagaaggccgttacaaaaacgtaataattaatcgggaacgtagcaccccacgcccctttcgagaaggatatttagggaaagatccgcgttacagacgcggacacataccgcgaataagcgaccctcggattcgatgctgcaaccgtcaaaaaaagatacatcgaaagatatgagtaccctgcgaaatagaaatgtacgattatatgctacaatcgtttaagggacatacggaccagatcctccaccgaagctccgggattttcccgagcaacgatttttacgactttatccgccgccgctttcccgaacccgagcatgaccagcgccgcaagcgcctcctcgtaatccccgccggcgacgggggccgtaacagtatcccccgtcagtcccaggccggccatcttgccgctcaactcgacgatgatcttctgcgccgttttcagccccaatcccttgacatttttgagaaggacggcgttttcggtagcgatgatcccctgcaactccctcggcgaataggtcgagagaatcatccgggcggtattgccgcctacgccggagacacttatcaggtggcggaacagttcccgttcggccttcgacgcaaagccgtaaagcaactgggcgtcttcccgaaccacgtaatgaacgaacagtttcactcggtcggagtgctcgatttcggaatatgtctgcaacgatatctgaagaaagtaccccactccgccgacatccaacacggcatgggtgggagcgagttctgaaatagtcccggagagatattcgtacatggatttctaattttgaatgtgccttggcaaaagtaaagatttttttctacctttgcctttcaaagcgatatttttaaccaaaacaacggataacacatgaaaaaactcttctttacggcactgatcgtactggccggacttaccgcctgcggcacgaaaagtaccgaaacggcaagcaccgaagcaaccgagcaacgggaagtgggcggcggcgacatcgcatacgtacaggtagaagccgtactcgcgcagtccgatctctacaattcagaaggtatcgccctgaaagacaagactgaaaaagcgcagaagagctgggcgcagaaggaacagaacttccagtacgaagtagcccaactccaggaaaaataccagaagggacttatcaccaccaatgacgcacaatccacgcaggcgaacatcgagcggcgcatagcttcgtaccaggccgcagcccagaaggaagccaaggcgctcgacgaagagaatttcgtcttctcgaatcgggcccaggacctgctgcaccgcgccatcgaaaatctcaatgccgacggtcgctacaaactcatcgtcaacgccaatgccctgctcgacgccgattcgacgctcgacatcacgcccgccgtgcttcaggaggtaaatcgtctttacgcactggaaaagaaagacaaggacaagaaataaaagagtgctccgctcacccgggagcaataccccgacaaaaaagtaacggctttctttcagagtcgttactttttttcgtaattttgtctctaattaacacacatgattgcatagttttagtgccctcttcgggagtgcagcgccccaattcccctccgaggaagagattttaggggtgaattggaatacaagcgcggacacggaccgcgaacaagcgctccccggattcgatgctgcggccgtcggacagcggtacactgaaaaatataattgccttaacgaaatacgccatgggatttgttccgttcacattcatcgacttcatagatatcatcctggtagcggcgatcatgttctggatctaccgcgctacccggggaacaaacgccccctacatcatctccgggatcatcatgatctacctgatgtgggttgtcgtacgcacgctcaacatggagctgctctccaacatcctggggcagttcgtcagcgtcggcgtcatcgcccttatcatcgtcttccagcccgaaatcaggcggtttttgcagatgatcggcatgcgccagaaacggttcaacttcatcgcccgcatcttcaaccgaaacgacaatacatcggtaacgatcatcgcaccgatcgtccaggcctgccgggagatgtccgcccacaaaacgggagcgctcatcgtgatcggccgccagagcgacctgcggctcatcaccgaaggcggtatcgccatcgatgccaaaatctcgacgccgcttctcgaaaatatcttcttcaagaacgcaccgctgcacgacggcgccgtcgtcatcgaaggcgaccgcatcgtcgcagccaaatgcatcctccccgtaacgcagagcgacgttcccaaatcctacggtacgcgtcaccgggccgcgatcggcatgagcgaaatttcggacgcgatcattctggtcgtttccgaagaaaccggcggcatctcgatcgcacacggcgggacgatccaccgcgacatcgctcccgatcaactggccaatctattacaacgtcatttcggagccaaccggcaaaaaggccgtcacgcgacgatgggtagttagacactcttcacatcaccataccatgctgctcccctccccgacggaccgtcttattctgcgctgttggcaggatgaagattttcccgcattcgcccggatgaacgccgattcccgggtgatggagtattttcccgctccgctctccctcccggaatccgccgccttcttcgaccgcatccgccgggaattcgaaacggaagggttcggactctacgccctcgaacgtcgcacggacggggagctgctgggttatacgggacttcaccgggtcacgttcgacggaccattgtacggccgggtggaaatcggctggcgactgcgcagcgacatgtggggcaacgggtatgccacggaagcggcccgaagctgtcttcattacgccagcctgtcgaaaatggaatctattatctctttcaccgccttgagcaatctgcgctcacaacgggtcatgcaacggctcggtatgacacgattacaggaattcgaccaccccgcactaccaacgggacatcctctacgacggcacgtcctgtacatgatccggacgagcggatacgcagaaacagaaccggaaacccggccggaaaaccttcgataaaacccacgacgcccctctaatctgcgagccgccgccgacaaaatttcccggcagcggcacgccctacaatacccgaaaacgttagaccaaggaccggagcactgcacggggaaccttcgaatattccaacaactgtcgtcaccgaatattccatcggtcaagatcgcaaacgggtccctgtcccggcctcccggcccaaactatgaaccgaaaccttatcgaaaattcgaccgtgcgaacagcccttcgtatccgaatcttgtcctcccgcctaaaaaccggcccggccgaagttctgaccttatggccaaccagaccgttcgaagctgcataaaaaaagccgtggaaaaatccacagccttttatatcggaatgaatcgcccgcttattcggcaggagcagcggccggcgcaggctgctgatcggaagccggaagttccgcctgcggaaccgcaggagcgggatcttcgacgatcatcttctccatcagcgcattggcatctttctcgagttccacgttgctgcgagccaccagaccgcgatccatagccagcgtagccaacagactcaacacgacgatcacgacggccatcgtccacgtaaatttctccaggaaatccgaagtctggcgaacgcccatcacctggttcgaagcgccgaaattggcagccatgccgcttttgggattctgaacgagtacagccagaatgatgagaatacttgcaaccagaatcagaatgatacaaagagtgtataacatgttcctatcgttttaattatttatttgcgattttgtcaataagcgacgcaaagtaaacacttttttccggatttaacaaacttaatttgcgataaatggcgattgcttcgtcgcaaagcccctgggccaggtagatttccgccagatcctccgtaacgaggtcgtcgtcaccgctcaattcggcctcggtgcggacctcttcaacgacttcgccctcctcggccacgatccgatgtcccccctccttcaggaaacggtcgatcaggtcggcaggcgaaagcgcacaaagcgcctcccgatcgaccgtgaaccgtccgagcggcaacagacgcgacaccgccgcgatcgacacccgacgatcggaacgcccggtttgaagcacgcgcaggatacgggcgggagtaaaccactcgtaacgctcgacgagcgcatcgagctgcgcttcatcgaccgggcctaccgtgcctccggacatcgtatattccttgaaatccgccatccgctaccagtttgccgccgatgcctggaaaatgtccgtcaccagtttatcgacgatttggggaatcagttcgccctcgatttcattcagcagtttcgaagaatcgaaatcctcgaacgccgaaaacgtctttttccacgacatgctctcgtccaccgcattggtgaagcgcacattgacggtaatggtcagtcggttcaacagggccgtttcggacgaacccgaaaccgaagccgtcgtcgaagtataaccggtgatctcgccttcgaaagcgaaatcgccgccttcgtccacctgcgtcaaacgcgtctggcgcgtaaacttgtcccgcaaggcatccgtcagcgtcgagctcaggatcggagccaccatcggggcgttgttcgggaagtaggccacactgaaggtcttggcatcgggcggaatcgaagcgcccgacaacgaatagttcaccttgtacccgcaaccggccagcaagaggcccgctgcgacgacgatcgcatatttgagtacagctttcattcgattatagacgatatttttcaggagttctcgtcgatgccgagctccttgattttacggtaaagagttctctccgacataaacagctcggcagcggcttcccggcggcggccgttgttgcgccgcagggcccgaaggatctgctcccgcagcacatcggctttggtcagttcccgcgaaggctgttcatcgaccacctcctcactctccgcatagtccggagaagcgatgctgtgggcggaagccggcaacaaccccgccaggtctttggtcggctcggcaggacgctcggcacgctgcatcagctcggtaagcatccgcttcaggtcattgacgtcggcccgcaggtcgaaaagcactttgtaaagcaactcccgttcgaaagacacgccgtcgtccggaccgctatgcaaggccgtactcatcgacgtagatgctccactttgaggttgtgcaggcaggtacttcgtcaggatggcaggcgtaatgagccgcgcctcctcgatggccgaaatctgttcggcgacatttttcaactgacggatattgccccgccaatagtaattctccagcatctgccgggcctcggggtccagagaaatggccggcatacggtactgggccgctacatcggccgcgaacttgcggaaaagcaggaaaatatcctccttccgttcccgcagaggaggcaccaggatcggcaccgtgttgagccgataatagagatcctcgcggaaacgtcccgcctggatcgcctcctgcaaattcgtattcgtcgccgctaccacgcgcacgttggtcttctgcaccttggccgaaccgacgcggatgaactcgccggtctgcaacacacgtaacaaccgcacctgggtcgaatgaggcagctcggccacctcgtccagaaagatcgtcccgccgtccgcctcctcaaaataacccttgcgggcttcgactgctccggtgaaggcccccttctcgtgtccgaacaattcggaatcgatcgttccttcgggaatagcgccgcagttcacggcgatatatttattgtgtttacgtgccgaataggcatggatcacctgcgggaaaaactccttgccgacgccgctttcacccgtaacaagtaccgaaagatcggtcggcgccacacgcagggcaacctccagcgcacgattgagcgcctcggagttgccgatgatcccgaaacggttttttatggttgtcagatctgtcattcctactcaatcaatccggttttacagccaataccggcaaactattcctgattcgtatccggaacggcctccacacccccgtccgtttcggcagccacgggctccggcacggccggagcgagctgttcgaggtattcgcgctccagacgctcgatcttcgcccggcgcagataaccgtaaacgatgacgcctacggccagcacagcgaccacgatggcgatgaccataaacttatcgatcctccggcggggcttggaacccacgtaggtatatccctcggtggttttaagcggtttgccgtattgcaatccctttacataaggtgcgggtttgcgcttggcagaaacggagatccgaggttcggaaataccgtcgtcgattacaggagaagccttcgcttcggaacgggatcgcacacggggtgcaacggactccgcagacgcagcgacggaagcggaatgagaagctgcggccgaggaaatcttatttccttcctccggagccgattccccggcaacagatcccgcagcaacagacgtggccggagccgcctgaaagacaatagcaccgcccggcgaaagggtcaggcgaccgaagccctcgattgcataggccccctcatgttcgagggcatgacgcacttcgaacacgaagcggtcgatcgccccggcagcctccaggtcgttcattccgccctgctgcaccagcaacccgcgcaagatgccgtcgtcgcgcctgagcaactccgaaaagaccacaccgccttcgggaaccttcacgataaaagttcccagttgcggcacgaccagcctcctgtgctgggtcaggtaattcgttatgattccagtcaacaccgttctgtcccgattaaaattcgacccaaaaatacaattttcatcggacaaaaacgaaaaaattcacctgttttttcaaaatatacggataaaccattggcgatctcgaaaataattacctactttgcatccccaaataaaaaacaatccgcacgagctactttgccccaaaatttacgatgtagctcacgcggattatatcgcaaaaaacacaaacgggccatgaaagacaagtacatcgacctgatcgaacagacattcgatttcccgcaggatgaatttaccgtcgaggacaacgaattgaacttccacgacattcccctgatggaattaatcaagcagtacggcactccgctcaagataacctacctgccgaagatctcccagcagatcaaccgggccaagcgcatgttcaacgtagcgatggcgaaggtcgattacaaggggacatacaactactgctactgtaccaagtcgagtcacttctcgttcgtgctggaagaggcgatgaaaaacgacatccacctcgaaacctcatccgcttacgacattcacatcatcaacgccctgtacgacagcggcgtgatcgacaaagaccgctacatcatctgcaacggcttcaaacgcccgcaatacgtagaaaacatcgcccagttgatcaacgacggattcgaaaacacgatccccgtgatcgacaacaaggaggagatcgacctctacgacgatgccattaccaaaaaatgcaaaatcggtatccggatcgccagcgaggaggagcccaaattcgagttctacacctcgcgcttggggatccgctacaacgacatcatcaacttctacaaaaccaagatccagaaaaacaagaagttcaagctcaaaatgctgcacttcttcatcaataccggtatcaaggacacggcctactactggaacgaactgtcgaagtgcctgaacatctactgcgaattgaaggccatttgccccgatctggacagcctcaacatcggaggcggctttccgatcaaaaactcgctcgacttctcgtacgactacgagtacctgaccgaagagatcatcgcgcagatcaagaacatctgtacccgcaacggaatcgacgaaccgcacatattcactgaattcggatcgtttaccgtcggcgaaagcggcgcgaccctctactcgatcgtcaatcagaaacagcagaacgaccgcgagaactggtacatgatcgacagctccttcatcacgactttacccgatacgtggggcatcaaccagcgctacatcatgctggcgatcaacaactgggacaaggagtaccagcgtgtgctgctgggcggcctgacctgcgacagcgaagatttctacaactcggaatcgcacatcaacgcgatcttcctgcccaagctcgaaccggggaatccgcaatatatcggcttcttccatacgggagcctatcaggagtcgatcggcggcttcggcggcatccagcactgtctgattccggcccccaaacacgtcatcatcgaccgggacaaggacgacaacgaatactacacccgcctgttcgccaaagaacagtcctaccgctcgatgctccgcatcctgggatattgacggaaacggattcccggaccgaaaattccggaatgtacgccaccgatacgaaagcaccggcttcctaaagggaagccggtgctattttaatgccggttctaatacaaccccgtaagcggacccaactgcacgatccaatctttctttccccacaggtaatccgtcatcctgaaccgaggaatatcgggataaggaggataataatcaagggattcaacctcaccgaatacgttcgatgtttcgtcccatctctcacaaaaatcctgcaagagaattgcctcttcataattatacacgtcgagttttacccaccagttattcaggtacagggtatcgctcggtgttacttcgttatccatcttgccatcgacaccggcacttaaaaaaatgaaggataccggaacctttttataataatcataaagaggaatatacaaaaactcacctccgtccctggcaaacggatccgtcagaaattgctgggctcttaaatcttttttcgccatattaggccaataagtttgctgataaaaatcgacggcttcatccatcgaacggggataatacccgaatgaattataatactctaatggcagtcgttgataagtcggccacataaagtaatccctaatactttctgccgtctcgacatacttgccactcaaataacgccacaacaccaaactgctcaaagaaaggataactaccaatgacaaaattgtcaagatcaatctttttcgtttcatttcgaaagaaaatcaaatccggttgaaatacaaaaatcgtaatttcaaattttttcgcagttctttatttcgatacggattcgttcacctcactccgtacagattatcatccatcttcgcttttacctttcgacctacaatcgttaccacttcgaaaccctccatgtactttctcatcatacaatgcaaccattcgggcatcggagaagtatccgattttatcttcaggaaattctttttttaatcgacgagcaatacggattccttcctcgtccagttcgaccactttatcccgatcagggaatccctttatgaactccttccaatattgctccagccacacatcgatccgtttcgaaagatccggacttatgccgacttcatcgtgctccaagtaacctccattagccgcatcccgaatgcccgttccatcgaagtatccatccaccgttaaataccgcataacaaacaaataaaataatcggcaaccatctcgctaatcgtcgtaatcgcatgcgacaaaaaggaccgggcagcgacacgctctttatatcactcaaaattcggaagcagccgaaacaataccagccaaacaaaaaaaatacctgtaattattataagacatattctcaacacacggttatttttaggcgaaatctttattttccgatagcatatcaaacttacagccacatacaaaatcaaaccaagtatgccatttgctatgaatattaaatatacgcccaacggatctccccactcgaatacacccgtcaagaaataccatacgatattcgcagcataaagaaatacgacgctactgaccgcaagttcaacttttttatttctaatactattctctggcttcattttcaaaagataattacgttttccgaataaaacccttaaaatcagtacagatcaacagttattcaccaaattccaaaattctatacatcaaccacttacaacatgaagcccaaatatttacttataaggacaacagccattataatcaaacatattttcaatgtacgactatctttaaatgaaagattcgttcttaaataaataaacaggcttattgcgatataggacataaaacaaagtacagcaacggtatcacttatcaaaaaaagagtaagatagctacccataattagacagtagatagttccgattgtactaaatacatacaataatgtaataccgcaaacggcggcttcaatttttctcatagctttttcgatgtgttttctttcatttcatcccaagcgaatacataaaaaccgtcacaacgtccgctcaacatattcagggatattggaatacgaatcattacgggaaagacataaaaatacactcattaagtatctatcaaccacctgctgctaaacgtcctctccctgtcaggaagccgcaggaaagcatctgccccacccattgacatcttcggggacaaggaaagaacaaatccgcccttaacgcaacgatccggccatacaaacacgtaatacttccacaggggccgggagggggggggaatttacaatacccccgcaaccgcaaagctttcagcaggaagcgctacgattcggattaaacaaaaatagtgaaaaccgagaaaaaacgaaaacttgttcccagttttccgaatcgcatcctatttaagactatgtcaaagatagtgagcagtgagaaatcgtgcgggcttgcacgcagagattgccgaatcgtatcctacctctccaagatagcgaaagccgaaaagaaaacgggagcttgctcacagttttccaggtgcattctaccttctacaaagctaggaaataaattgaaaaactcgcctggtgccatcggcaaaagatcaattacccaggtcggcttcggaaatcatattattcagcagagcatagaccgtgagaccggcgatggtcttgatgcccgtcttgcgggtgatgttcttgcggtgggaaataaccgtatggatcgatatgaaatactggtcggcgatctcccggttagtcaggccccgggcgacggcaacgaggatctcgcgctcgcgctccgaaagctcatagccttcaggctgtgccgtcgtacgcgtctgctcgagagcctgccgaagtttgtgatgcacccgtcccggtgagtcgtaaagattgattactccgtcgaactcgtgcagcagctcatcgtccacagctccgtgacagagagcgataatcggaacgtcctgcaacatcggaaaggcgtttcgtatcggagtgcggcgcatcacgggaaacagcgcgggattgatcagcaccaggtcgggtcccgtcgtcgccacccgttcgaaacaggtcgccgggtcgccggtagtctcggcatcgagggccctgaattcggaaaaaccgtccaacaatgtccgaataccggcccccacgattgcggaaggctcgataatcaacactttataaatacgaccgttatccatttttctccaatttttcgaccaacggaatcaagatctgattctcgatgacggtatgtcggctgaggtcctcctcgaagcggaaaatatcggagagcacttcgtagcgcagcttggcggaacaattttcaggaaggtacttgataatgatattcttcagatcgcacagcttcccgtcgatatcgctatgattatcttcgaaacagaggatattgtaaccgtccacccgacgtttttcgagcagagcctgcacgtaaggaaacacggttcgctcctcgtaatcgaaatgattatccacttcccggcggtaatcggcgaaaaacgtactcaagattttactgtgtactccgtcgcaagtcgctgtcatcgcggccatcttcgcatccagatgcggaagagtaacctccagataatacagatgcgaagtatgcaggtaatcgaggacaccgcccaaatcgtccgaagtcagttgctcataaggcagaaccgggacctccgacgaataaattcggcaaatcatcagaaaaagctccgccgaaattccgcgttggcgacagacttcgccgacactcgactcgccgaagccgaggggaatacccatgcgggcaagcaccacgagcaactcgtagttggactcgaccaggtcggccagcttcatacccggcgaaaagaggagacgcccccgctccgtattatcgaaagaatgttccgtctgtttcataatgcaaggattatgttacaaagatagtgaaagccgagagaaaacgggaacttgttccctgttttccgaggcgcatcctatcttctgcaaagatatgcaaattcggacacaccgccgaatccccatatattggtatatcgattaccgcagcccctatttattataagtacgatatcggaatcggggcatccgcgattttcaacctgttgtgttcgaaccacttcataaaatcattgaatttctgccggttgtcgctgacccacaagccgaatgcagtcttattcccttcccggagcacccaatagttgtaggcttccagatgaccggcatcccgcaccgaacgcagatattccaaaaaaggaacgacgatttgattgtcatacttcagcaccgtattcgccccttcgtccaacttcttcaggccttcgtcgatccaccggctccggatccggttcagggattccagatcgacggaccgttcgcccccggccgcagcctgcatcgccgcctcgtacacggcaccgtaaggctcccgcacatccccggccagaagcatatcgatcgttatggcgatcggacggttctcgtaaaaatcgaccgacacggaatcggtggaaaaaacgatgccagttttatagttacggaacaaaagctcgctcatctccttattccggtcgccgctgggtagcaggttcatcattatctcgccataaatctggctccagaccttgctggtggaataagcataaaactgggccgcccggtaatagttcgacgggaacatcggagctacgctgatgcctttttcgaaagaagcgaccgcttcgtcgtaatgcccctgcattcccgaaacgaccccctgctccagataaagagcgcccgaatcgggaaagcgtttgagcccctgcgcataaactttcaaggcttttttcggattcttcagataatcgtagcaatttccgaccaactgataaaccagatcgttgcaatcctcgtacttataaagtgttttggcgagtttgatcgctttctgataatcccgtttgaccatataggcgtaagccatctcgtacgtcaaaggccaatagtccggatcgagtgtcagtgcctgccggagcaacacgataccctgatcgggatcaccgttatccatcaattcaatagcctgccgctgcaatgcgagcacctgctcgcggttgttctgtccgaatgacagttgtgtgccgaacagacaaaacaacgcccatagcaatattccaaaaagtcttttcatgacaacaaaaagttaattttcgatgaatgaagttacgattattttttggaaaaacaccccttcgacaaacaaaattaccctttcgcaccgaattaccggcacgaaagggtatatttacacgatacgaaacggaggttatttccccttacgggcgatcacggcatcgatgcaggcccggattttcggtgcagggtcctcccacgtatcgggcttgatgaccttgccgtccttgggattgtagtgcggcttgccgtcgggccacaacttggccatgttagcctgctgaacgatttcgaacagttcgtccggctcgagtcccatctcgaccatcgtacccagcgcgaagtacatcaggtcgatcatcgcgtcggcctgctcgtagatatcctcggcgaccagaaattcagcaacctcctcgttcatccatttcgcccggctgagcgagcgttttttatccagcatacggggtgcatccggacacggatgaccgaacttttcgtgaaattcacgcacgtcgttccactctttcttcataacactcaaaattctaaaacagccataaaggtacgaattaattttcacaagacacgtcccggcaggagtttcgaacctcttttttccgggtgccttttggcaaaagagcggaatgcccgcattttcgatcgtacaaacatcgaccgaaaaccacgaacacctttttttgtatctttttacaaaacgagaatatgatccgaacagcctcggacaaccgacggtcaaaaggacgaaacagaagatatctgtgaactctgctctcaagaaaaagtcggcttcggcaacgacgtttggtttaccgtccgcacttcacttttctggaaaaataggatacggttcggcatagctcaaacgacgctcggagggggagggcagctacgcttacgtataatgccctgcaaggaggcgcaaaagggacttgaacaaatttggttctgtccttgtcttttactatctttgacatagccttggataggaggcacctcggaaaaccgggaacaagttcccgttttctctcaacttttcctatctttgcaaaaaatcggatgcgtggcccggacaagttcagacagatttggcttaccgttcgccttccactatttttgcagaaagataaattggccggacagacgattgctgccgccgcctgcgaaacgatcggatcgaacccgggaacaccctcgccgtacctcttttgctaccgcttgtcatgcagatcaacaaggcacaattcgtatgcagctccgagcgtctttcgcaactgccgaaagactcgctcccggagttcgccttcatcggccgcagcaacgtcggcaagtcgtcgatggtcaatatgctcacaggtcgcagcggcctggccaaagtttccggcaccccgggcaagacacggcttatcaaccatttccgcatcaacgacagttggtatctggtcgatctgcccggttacggttacgcccgcacatcgaaaacccaacgcgacgagttcgccaaaatcatcaccgactacgtactccgatgtgaacggatgcacttcctgttcgtgctggtcgattcccgactggagccccagaagatcgacctgcgctttatcgaaatgctcggccgggagggtatccctttcggcatcgtctttaccaaaaccgacaaactgtcggccgcacagctcgcacgcagcgtcgaacgctacaaacaagtgctcggtgaacagtgggaggagttgcctccgatgttccgctcctcgagcgaaaaacggacgggccgcgaagagatcctggacttcatcggcaaatgtttaacagaatgttaaaaaaagattttagaaatacccgataattcggtctttacatcctatctttgcaccattcaaaaacacaatcacatactatggctatccacaaaatcaaattcttcgcaggcaggggctcgcggtacctcgcggagaaaatcgtcgcaagctacggcaccacgctcggaaactcggaggtgcaacagttcagcgacggagagttccagccctgcttcaacgagtcgatccgcggctgcaccgtgttcatcatccaatcgaccttcccgccgctggacaacctgatggaactccttatgatgatcgatgccgcacgccgcgcatcggcctacaaggtgatcgccgtgatgccctacttcggctgggcgcgtcaggaccgcaaagaccgtccccgcgtaccgatcggcgcgaaactggtagccaacatgctcgtcgcggcaggcgtggaccgcattatgaccatggacctgcatgcggaccagatccagggcttcttcgacgtaccggtggatgcactctatgccagcggcatcttcgtaccgtacatcaaaagcctgaacatcgaggacctctcgatcgcggcacccgacatgggcggcgccaaacgggccaacacctatgccaagcacctgagcgccccgatcatcatctcgcacaaggagcgtgcgaaagccaatgtcgtgggtaaaatgacggccatcggcgacgtgaagggtcgcaacgtaatcatcgtggacgatatgatcgatacggccggcacgatctgcatggcagccgatatgctaatggaaaaaggtgccaagagcgtccgggcagccatcacccacccgatcctttcggggcaggcttacgaaaaaatcaatgccagtgccttgcaggaggtgatcgtcacggacaccataccgctcaacccggaaaaggacctgagcaaattcaaggtgatgaccgtagcggacatcttcgccaacgtcatcgagcgcgtacacaactacaaggagatttcgtcgattttcttcaagtaggaggagtttacaatacgacaaaggggatgctttttcgagcatcccctttgtcgtatttaatgtttcgctatccggtgcacctcacaaaagcgacaacagtccgaccgccaacgccgcaaaaatacaggaacaaacgcgtatgatgcgattattgcagaaagacaccttccacaagaaataaaacccagcgcaacataaaagatataaccccagtaaaaccaaagaaacaatcccgcaatacaccacgtaaaccagcccgtttccgcctgccccatcgcatatcataccaacaaaaaatacgattatgtcgagcagtagcaacccggtcagtacaagggttgttatttctgcaattctgtttttttcattttgctccgtcatttcagcggcgaatccggttcccggaccataaccatatagaacatacggtcgaggaagccgggggcgaatttcttgataaagtgtgtggcacgcccctcagcctccatcaggcaaaggcgtttgcgcttttcgattccccgaataacgatacgggcgacctgttcgggcgtcatcatcttcgcctcgtcgcgcggtgtctcgccctggctcgaaccgtcggccgtgagcgccgaaaagcggacattcgaagccgtgaaccccgggcaggcgaccatcacgtgcaaccccttcttcaggttttcgatccgcacggtttccagaaatcccgtcatcgcatatttcgaagccgaatagcccgtacgccccggcaggccgtgcaaaccggccaccgacgagatgccgaccagcgacccgtgcgaagcctgcaagtacggtaacgcgtatttggtacaatagaccgtgccccagaaattaacgtccatcagacggtgcagcacctccagatccacgtcatcgaacagcgcccgcatcgaaaggcccgcattgcagatgagcacatccaccccgccgtactccccgacggccgtgtcgatcagattgcggcactcctccggcttggtcacatccaccgcgcagtaggtcgcttcgccgcctttggatcggatatctccgacgatgagctgcaatttttgcaggctccgggcgccgagcaccacgttggcaccctgcaccgcacattcacgggccaatgcctcgccgatccccgacgaagctccggtgaccacgacggtctttcctttcaaacctttcatcctatcaatcgtttacatttatttccaatccgtcgtaagccagatataccccttcgggcaacaacgcggaacgctcggcgtaaagacccatttcatgcgacatatgcgtcagatacgcccggcggggcgccacacggcgaatcagcgccaatgcttcgtccagtgaaaaatgcgaatcatggggctggggccggagcgcattgaccaccagcacttcgacaccgtacagcttccgctcttcggccggggcaatggtcttgaaatccgtaaggtaggccagttcgccgaaccggaaccccgtcacctcgaatcggggcgaatggtgtcccgacacgggaatcacctccttatccttgacgcaaaaaggaacggcaggatctatttcgcgcagctcgatttcgggcacccctcgatacttgtccacactgaaggcatagtcgaagtccttgcggacgcatttgagcgtctgccgtgttccgaatacgtcgatccgatagatcgtgggataatcgacgaaattgaaggcccgcacgtcgtccaatcctccgatatggtctttgtgttcgtgcgtcagcagaatcgcgtcgatatgccggaccccggtccggagcatctggtaacggaaatcgggcccggcgtcgatcaccagccgtatgtcgtcccactcgagcatggccgaagtccgcagacggttatcgcggggatctttcgaggtgcagacggcacaccggcagccgatcaccggcactccctgagaagttcccgagccaagaattataagtttcatacccatcgcaaaaaaacgtcggagtttctgtttttcccggcgacgggaacaaaaatacaaaaaaaaacaccgcagaaaagagaaatcgccgctttttctcgcacactccagatacggggagcagcgcgttttaccgtacgctcgaataggctggagcgactgtcggtatcattcgaagggcggcgaaaacgatccacgataccccgggtaactccggcggtgcacacccgaacaattcggtatctgtcggaaaaattctaaaaccataccgccacaatcctatacctctcttcctacagatccgataatctcccggaaccggccgccctctcgcccctcccgaaaacgctaccgcaagacaaccggaacacgccctgcgaaacagtttcctccaccgcaaacagaaggcgggccggcaactgctaacgatcgccgccgttcccggcgcacatacgacattcatcacattccgctcggaggcgtccagaaaatccgatgtacgttttgcgattcgatttgtataatttgagaacgaaacatccttcaatccggataattttgtataattatttttcagattcgggtcaaaccggaaaaaccattcccggacacccggattttttaccccgaaaaacaaggaatttcaagccccgtatatcccacccgactctaccgtccataaatttcaccgacctccatccatcgaaaaaatgcaggacggaagagtcgcacggggcgatttcccggcgaaagccgaaataatagcgcaaaaagacatttttagtacttatttttactatcttagtattcagaatgttggaaaacctcacatatttccttaacggagcttccctgtcatttttcgctatgggcgccttccacatggcgatttatgcccgacagagcaaatcccggccccattatctcttcacgatctgcctgatatggatggcattgatcgaactcaaagagtttttcctgagccacgatgccgcctacaactacgaaattctcggcccgggcttcacctttccggacctgtttaccctggctctgctgtcgctcttctttttcgaactggtgatgcccggccgcatcacggcacgatacagcctcaaactgctgagccccttcgttctgctcggcggcgcctactggctcggaacggctttcgaaccccgcacggtatatgcttccctgccggagttgctaaaggacctgccgtccttcctgccgacggtaattctgctctacaccctatacaccgtcggttactgcctcttcgccctgactcgcatcgtcctctactccatccgttactcccgggagatcgcccaggcctactcgttcacggagcgcatccacctgcaatggctgcggtggatgtcggcactgctggccttctacctgctttcatacatcatcatcattctatttttcagcaatatctggttcaccattctcatctatatcctgacacttaccgtctggggtatcctctacggctgcatcctgcaataccgcatcccggacattatccgggattactggcaaccgctcccggaagaagaacccatcgaagaaaatccggaaataaacctcgccgaaggaaaaggacgcgccgcatcgctgcgggaacagttgcaggaagccatcgtacagcgcaaactatacctcaaccccggacttacgatcatcgacttggcctgcgaatgcggcactaaccgcacgcaactctccctgctgctcaacaaggaattgggcttgtcgttccgcgactacatcaaccactgccgcattcaatatgccgccttgccgctgctcgaagacgaggaggccggccataaaatcgaagaagtggccctgttatccggattcgggagcacggcgactttctaccgcgccttcgccaaagaaaaaggcatggccccgcaacaatggcaggagtccattagaaaatcccggacaagggggggggaaggcaacggtttacgggaaataaccggacttcaggaagagtgtccgtaaggcatcgttcgcaacattgaacaagcgtaccgaagtcgcaaatcaatttgccgctccgattcatttacaatggacggctcaaggatacggtcctatttccttttaggacaaaagcctgctctccgctctccgagcgtcgaacccataatccggaagcacccgtcagggataccgtccgatcttcttcaacgatagccggcatcgaagagccagccccggataaagttcatcgccgaataaaccaccccatgagccggatcctgcgccgcacgccccgaatgcccgaacacccgtcaagaagccgccggccggttatctcttacggtcgccagaagtaaaaagccccggacaaggtcgcaattcctatgtgccggggtaacgaatccacaatccggaaagcgcccggcccccggacaaaagcctacgctccatacaccccgacggtaaattctgcggccggcacgggctcagatgcaaaagaagagcaccgcttcgatcccgccggaaacggacacgcctcgccgtaaaacatcggcagtcatataccgccaatataccttattcgacggtcgtttattcacgacccgtgaccgtgttgtaatacttgtcgccctaaatcccttcgctcggaggaaacttgggctacgacacaccccaaagggacaccgaagtatataatcacaaaaatacggtacttcccggcagtcaaatgaaagcggcgcccccttttcggaagcgccgccgtatcaatcgaaatacaggtcttattcggtaacccgctcgagccatttcaccataccgagcataacgcccatcgagatgatgcagaccgagaagaatacagtccaagccacccaaataggataagcattgtagatgagcggaccaatccagagcagcagattgcctacggccgttgcacagagccacagaccttggcaaaggccctggagatgcttgggagcaactttagaaacgaacgacagaccgagaggagaaatgaacagctctgccacagtcaggaagaagtagagtacgaagagcacccacggtcctgtcttgagagcggccgcctctgcagccgggagatccttgaacgcctcggccgaaggataaccgttgatgatcgagaatacagtcatgaaaaggaatgccaatccggccaaacccataccgatagcgatcttgcgaggtgtggaaatcgcttttccacggcgtgcaagagcggcaaatacccacatcacaacaggagtgaggataatgacatagaacgggttgagagcctgccatatttccggctgtacggagtcggtctttacgaaatcgcgggcaaagagcgagagtgaagttccgttttgatggaatgaaaaccaaaagaagatagcaataccgagcacagcgaagagggctgccatacgctgcttgatttccgtagccattgcagctttttcctctgcagaatatgtaacggtttcctcttttgctttctttgcgggagaaggaagctgccttttggtgaaaaggaatatcgagagggaaataagcattgcagcaacggaggcgataaacgaatagtggatgccggtgttgaagacattaagatagttcgcacagaatgccgatacggagccggcatcacctgcaaccaccgaaccacccacctccgcaatgagttcgtaaagcttggttaggtttacttccgcacccgccaaaaatccgtggcaaagagccggaagctcggcattatacatcaaaccgttctcactgagccaccagctgcggagcaaaggagctacgaagggagccacaacgccaccaagattgataaagacatagaaaatctggaaaccggcatcacgctgcgaagcatagcgaggattgtcgtacaactgtccgacaatagcctgaaggttgcccttgaaaaggccgttgccgaatgcgatgaggaacagcgcaccgcaagttagcgtaagaagccatgtctgattctcaggagtcgcgaaaatggggaatgccaatacgacataaccgatagtcatgacaataagaccggaaatgatggttcctttgtagttctgcgttctgtcggcaatgataccgcctacgaggctaagcacatagataccggcgtagaagaaagaatagactaaagcactggtctcttcagacaggccgaatttggaacatagaaacagcacaagcaccgcgttcatgatataatatccgaaacgctcgcccatgttgctcaatgctgccgggatcaatcctttgggttgatttttaaacatacgcgattgaattagaattttttctgttttttgtttcgcggacaaagatagaattatttttcctatttttgttataataatgaaccagtttatgggaaatccgacgaaaaagctcccgatgatcgagcgggacggctggctgcttccggtcgagaaagagctgaccgcccggcacgagagctacctgcgggcacttcgggaaatagaaaaatcggccggatcgatcgtcgattacgccaacggctatcgctatttcggatggcagcgggacgagacgctcgaaggctggtggttccgcgaatggcttcccggtgcgcaggacgtttatctgctgggcgacttcaacggttggcagcgcacttcgctgcggctcgacagaaacccggaaggggtgtggagtattttcctgcccgatgcgatgtatgccgaacggctcacgcacggctcactctacaaaatccacgtgcacggcgacaacggctggcacgaccgcattcccgcctatgcgacccgcgtggtacaggacgagaaaaccaagaatttcaccgcccagttctggaatccggtcccgttcgactggcagggcgaccgccccattgcggcccgcagcgaggagttattcatctacgaagcccacgtaggtatggcccaggaacgcgaaggcgtgggcagctatgcggaattcaccgaaaagatcctgccccggatccgggaggagggttacgatacggtacagttgatgggcatcgccgaacatccctattacgggtcgttcggctaccacgtgtcgaacttcttcgccccttcctcgcgcttcggcacgcccgaagcgctcaaaacactcgtgcgcacggctcacgaactgggacttgcggtggtaatggatctagtgcacgcccactacgtgaagaacctcaacgaggggatcaacgagctcgacggcacggatcatctctactccctaccgggtacggcgggcgaacagccctactgggactccaaaactttcgattacggcaaggaacaggtgcggcactttctgctctcgaacgtcaaatactggctcgacgaatttcacttcgacggctatcggttcgacggagtgacctcgatgctctaccgccatcacgggcacaccgacttcgtccggagggagcaatatttcgatgaggaggtggacgaagccgccctcacctaccttacgttggccaatacgctggtacacgatttccgtccccgagccgttacgatcgccgaggaggtgagcggcatgccgggcatcgcggttccgactgcagacggaggcgtcggtttcgactaccgcctgggcatggccattccggatttctggatccgacaactcaaggagatacccgacgaacagtgggacatacacgccatttggcacgtcctgaccgaccgtctgccgggcatcaagacggtcgcttacgccgaatcgcacgaccaggcgttagtgggcgaccagaccctcgcgttccggctgatgggaaaggagatgtacgaacacatggaccgcgcctcgcaaagtccggtcatcgaccggggaatggccctgcacaagatgatccggctcgtcacgatctcggcaggcggggacgcctatctcaatttcatgggcaacgaattcggacatcccgaatggatcgactttccgcgcgagggcaacggctggagctacgcctacgcccggcgccaatggtcgctcgcggacaacgggctgctgcgctatgcccagctcggggagttcgaccgggcgatgatcgccctggtgaaaaaatacggcatactccgcgacggctacccttacaatttacagatggacacccagaatcagacgatggccttttcgcacggcgacctgctgttcgtattcaactggcatccgtcggcctcgatacccaattacgaagtacgggtacgggttccgggccgttaccgcccgatcctctcgaccgacgagcgccgtttcggcggcacggagcggaccgacatgcgggggcagcatttctcctaccccgtgcagggggatgaactgccccgcatccgcatctacaacacttcgcgcacggcgacggttttcctccgagaagcgtgaaggagaggaccagccgcccgcactacccgcaccgggcggtcggaaaacgaccgtttcctgctcgtccgtcctaccgggaaatccgggattcggaagccgccgaagcctatcagacaacgaaaacatcaaaaaaacgacgatacaccgctgccgagcggggtttcagacaacgatttccatacaatgacgaaaaaataccgacatctgctgttcgacctcgacggcacgctcacagacccgatggagggcatcacccgttcggtacaatacgccctgcggcatttcggtatcgaagtgagcgacctacgcgagctctgccccttcatcggaccgccgttcgcggagtccttccggacattttacggcttcgacgaccgccagaccagcgaagccgtagccgtatcacgggagtatttcaccgaaaaaggcatcttcgaaaaccggctctacgacggaatggacgagctgctcgacacgctcgcaagcagcggatatacgctctgcgtcgccacgtcgaagccccgggtattcgccgagcggatcctcgaccacttcggcatcgccccctatttctccttcgtcggcggcacaggactggacggctcgctgccgacgaaggccgatgtgatcgctcacgtgctggccgggagcaacatcaccgatcgcggaaccgccttaatgatcggcgaccgcaaatacgacattctcggtgcaaaaaccgtcggcatcgactccgccggagttctctacggctacggcgaccgggcggaactggaagcggccggagccgattacatcctccccgcaattcccgacctggaagagctgctgctcgaataaacggacgaaataccggaaaacagagggattgtctgacaagtccgattttaacgttttcacccccgtcggaataaactccgacgggggtgattttcaatttcgggaagttatcgaacagccctttcattcagttgcgggcaaccttgaaagcctactttttcgctgcggccgtacggcgggcaatgtcctcggccgtatgctgcacccgggagcaaaggttcgacagatcgacgccctcgatccggcggccctcgacgacgatctcgccgttcaccacgacggtatccacgtcggcagccttgccgcagtagatcaggttcgccaccatattatataccggcgtaaggtacggcttcaccgcatcgatcagaatgaaatccgccagcgcaccctccttaataacgcccaactcgccggcatgaccgatcgcacgggccgcattgacggtcgccattttcaggatttcgtaagccggcagcacgcagggatccatcgtcgctactttctgcaagaacgatgcggtacgcatctcgtcccacatatccaggtcgttgttcgaacaggtaccgtccgtgccaatcgtgcaaagcaccccttcgctatgcatccgggcgatcggggcgataccgctcgaaattttcatgttgctctgggggttgtgtgacacggccactccgcgctcccgcaggatgcggatatccccgtcatcgacgtgaacgcaatgcgcaccgatcgtccggtcgtcgaaaataccgagggtatcgagatgccggacagaagtagtaccgtaacgctcccgcacgatacgcacctcgtcttcggtttcggaaatatgggtcatgaaccagagtccgtggcggcgtgccagctccttgccccgctgcaacgactccggcgaacaggtatagggcgaatggggcgccacggccaaccggatacggtcgcagtcgcccgtggtggcgatcatccgctccacatcgtcggcaaaagcctcccaactcgtatccagatagctcgctccgagcatggcccggatgccgagccgccgcacggcctcggcgatacggttttcgtgccaatacatatcgacgaacgtcgtgacgccgcccagcaacatttcgacaatgcccatttcggctcccagcacgatttcgtccggggtttgctgcgcctcgaaaggccagatatattcgtggagccacttcatcagggcgatgtcgtcggcatagccccgctggagggtcatcgccacgtggcagtgggtattgatcagtcccggcatgagcaccttacccgtgccgtcgatctcccgcgccccgggatgctcccgccggaacgcttcgatccgccggggatcggcgctgaccagcgccaaacggcgatccgccacaccgaccgcccccgtgaaagtccggggctccttctctgccgtcatgggcagaatcgtacagttcgtaaataacagttccataagcaatacaggttcgacgcaatcggaattacaaaccgggcggttatcgtcaaaacggcatacgtcgaactattttacggtgttcacgcgaacatccgatcccattttgacatcttctcgaaaccgcccctatcaaagcgccccttctatcgatcgcttccgggacgtacccctttccggcaccggatcattcggtatccagagagttcccgcaaacggtaatcagctcccgccccgaaaccgaattggaatagatctggatcaccttgctgaaagtgcccggttcgttcttatgcggttcatagaccacacggatcacagccgtttcgcccggtgcgagagggcgcttggagtggctcaccttcaggcacgagcaggtagtctgcgcccttactattactaacggagcagagccgtcgttcgtatattcgaactcccaaaccagatcgccgccccgacggggtacgctcccgaaattatggaacgaactctcgaatttcaggtgcgctccctcgtattgctgggcgccggccccgagccatgcaaggcacgaagccgcaatcaataatatcgtacgtatcattcgtgtcgttttcgcagccatcgtccgctgctgttatcgcgccttcagtcgatgcggtgcaacgtcgcacggcaaaccggattggcagcgcattccaatctattccaacgtaaagacataggtaatcgttccggtctgcatcaaactctcgctggatgaaaaccgagctttgcgggccgcttcgaccgccgcatcgaccagccgcttgctgttggtcgtcgatccctgcgcccgataggaggcgtatgtcacccgaccggaagcatcgacagtcacatcgacgacgaccttgccggactcattgcccggataggaaggcttgggcagctttcccaccaccgagcgccccgaaaggtcgtaggcaatgcccgaatcgctctggcccgtgccgtcgtgactgccttccggcgcccccgaaaggtccccggcgttaccctcgcccgcagcaggcccctccgacgtagaagtgctccccgccgtgcggcccgggaagagcgcccgacggtttaccgtgcggggttgttcggcaggctgctgcgcgtcgctgcgctgcggagtttgtcccggagtctcccgctcgcggggtttcttctccggctgcggtgtctgcacggcgatctcctcccgctcgctggtcacgtattcgacctgctgccgcgacgcttcggccgccgcctgctgcggcggtgcctgcacatcggtagccgacaggtcccggtcgcccagaccggtttcggtcgtcccgaaatcgatcagcaacccttcgccgggaagcagctcgtcccgccccatatcgaacgacacgaacaggaaagccgccgcgatcgacagcgcataaagcaaagctgcgaggcttgcccaacgacgcgcgttcgatttatcgttattcggatcgtaataatacatcggtcaattctcacaaggaaaacaccgcagggcggcattccccgggtttcactctattcgggcgaggtagccgcgatgagcgtaaaattgttggccttggccatgcgcatcatggccaccacttcgtcgaaagccaccgacttgtcgcaatgcagcgaaacggtagggttctcctgtcccgccagccgggacttgagggctttctccacgccctcgcgcgagccgacgttttccgtctcgacataatacctgtatccatgtcccgtatcctggatcgaaatcgtcgtcattgccttgtccttcaactgattcgaacttttcggcagaatcagcttgatggcattggggttgatgagcgtcgtagcgatcagcatgaacagcagcaacaggaagatcaggtcggtcatcgaagccgacgaaaacgacttatcgaccttggatccgcgtttgattgccataacagattacttttgaacgggttgattcagaatatccataaaggcgatcgagttggcctccatccggaaaacgagcttctcgatgcgagccaccaggtagttataaccgaagtaggccggaataccgaccagcagaccgccgaccgtcgtgatcatcgccacgtacataccgctcgaaaggagcgacatatcgaccgtaccgcccgcagcggccatatccataaaagtctgcaccatgccgaccaccgtaccgagaaaaccgatcatcggggcgccgccggcgatggtcgccaggatcggcaggttggtttcgagcttcgacacttcgaggttcgccacgttctcgatggccgactgcacgtcgctcatcggacgaccgatccggccgatacccttttcgatcatacgggcgatcggcgtattggtcttgcggcaaagatcgaccgcagcagcgaccttgccgtccaaaatataatcacggatgcggttcatgaaattcatatcgaactccgacgccttgcggatcgccatgaagcgctccacgaagataaagatcgtgagtcctcccagaatcaacaaaacccacatcagccatccgccgctcataaacaactgccaaagtcccatgcgggtctgctccgcgacaacgaccgcatctgcggtctgcaacaaactaatcataatctttttgagtgaattaaatttattttattcgagttttactttttccgtatcaatcccgctccaagtcgtattcaggctccggcggatcttccggcagaagcaattcctgccgttgggcctcttccgccgcacgccgggcctgctcctcgcggcgggcctgacgctttttctgacgtttcttgttggtgaagcggtcccgaatacgctgtttcagatccttgaaattattgaaatcctccttataggagatcccgataccggtttcctgcaggccctggttctcgtcgaaacgatcgatggtctgcgtgaacgccttcagacgcaggttgcccgacttgtcgatcagccacgtcacatgcgcttcgcccatgaagttggaaacattgttgcttacggcctgtttgttgtcgatgatgtagttgccttcgacctcgaccagcagacggttgttgatcaaattggtggagaagccgaaatccacctcgtcaccggtcatttcggagcctgcccggtagttcaggatgatccggtaatcatctgtcgaaaaccagttggtaagctggttggtaagcatctccagacccgttgccacaccggacgaagcaccgatattggcactgccggaattgctgaaagtacccagtgcgaccagcgaaatgaactgctgcgcctgggcttcctgcgtattgagcacgctggccaccgcagcctgcgtttctatatctgtaacgggcacgaccacgctgaaatccaactgcgggttgctcaaacgaccgccgatatggatcttacaatcgaccggcaccgaacggtccgaaatccgggaaccgctctggtcgtcgtccgaagaggcggttacagtgttcaacagaggctgcaacgacgttttgagcttatagacggcattgatgtcgagccgcgcatcgacaggctcgcccgtccactgaatcatcgaaccgctctcgatgatgaattttttagtaatgatattctgcaatgaaaaaagaaaactgccttcgatgagcgtatagtcgccgtacatattgaagataccgttacccggattgatatgcaggttgagcataccgttgccacgacctttcagggcactgccgaccgtcgggtcgatcaccagttggaaagcggtattgtcctgcacattgagagccatcgtaatatccatcgtgctgcctgcggcttcctttttacgcccctgctgctggaagagcagcttcttgcgcaccagatagtcggtcgtatcgatctgttcaggggtgacgaacgtaacgaaatcggccgttttcgcattcgactgtcctgacagaggcatataaaattcggaatcgccttcggtggtagccacgatgtccattttcacaccgcccttgctgcccgcgatcgtcgccgaacccgaaacgaaaatccggccgtagaacaggtcgttatccttcgaagtggtattgagcaccatcaactctttcggcagtactttcaccgaatagaagatattggacaaatgttccagattgaggtcgatcgagaaaaggccctcgttcttctccggatcgtacagcggcacgccttcggcaatcaaatgattgtttttaacctcgatcacggcccggggcatcgtgtaggtcacctgcgtaaaatccaccgtcgtggtgaaatcgcgcacggcgatctgcccagaaaggttcgcctccttaccgctaccgcgcagggcgatatctacatcggcattgccgccggtccgctcgaccacccccttcagcaggggatcgagcgccgaaagttcgactgcgtcgagggtagcccgggcgtaataacgcttttgcgaaggggcgtaaaaaccacgaacgagagtatcgagattttcccgctgctgcaccagaatacccgcgcggttctgtatgaaatcccatcgggaccgcagccagatcgacggaacggcgagatcgttgatcgaaatgctgtccacaacgatatcggcctgcacctcgccggccccgagcaccgctttcatcgtcgccgaaccgttggtacgaccgtccacacggtagcccatcgacgaggtgaactgcgagaagggcgccagctcgaaattatgcagcgtcaattgcaccgaatcctgcaaacgacgcgatacgacgccgtcgagcagcagttgctgcccggcattgaccattcgaaaacggtcgattcgtatccgggaagtatctgccgtaataccgtccgtatagatattccaagtcttctctccccggctgatgtacgacggcgtcagccgcagatcgatctgccggcccgcaggacctcgtccccgggcaaattccgaacgaaatccgatccgtccggaaacatcgccgatagtatccgcgaaatcggtaatcagctccagcttgttatccttggcccctccgctcattccgacacggctcatgtgaaaactgttcagataaagatcctcggtcgaagccgcgaaaacgagcgagtcgccccggttatgggcatccagattcagacgtgtcaccagcatccggccccgctcgatgtaatccgaggccgcttcgaacgaaagtttgtcgttcgccgggttgatccgcagcagcaactgcgatccgtccgcgatctgtaacccgggagaaacggcattgaccagcggattgatcttccggacattgaccgtaagttgggaatatccgtcggccaactctaccgtatcgggatgctgcgcctgccagccgggaccgccgtcaagcgtcgggacataatctcggaaacgctgttgcaggtaggcgaacacctccttgtaggaggtcttcccctcgtagtcggcatcgacaaaatcggaacgcagacgaataaacttgtccgacaagctgttccgacccacgatcacaacgctgtcggccgcgagctcacggtcgttataacgataggatacatcacggacgaagattattccgttcaggtcgtcgagcgtacggccgacggcacgcgcagcgatccgggcggcaagcaccgacaccgaatcgcggcgattcacccccagagccgccaggttcgcctcctcaaggtccagcgcaaaatcgtagcggggcctctgctcatcgttcaggtcgagcagccctctgaaatcgaaccgcagattcctgtcccgggcttcgatcagtccgttgaactcccggttcaccaggtgccccttcatacggagcgaatcgtaatcgtatccgttgatccccaatcgcaggatctcgcccgacacttcggcgtcggagtgttccgagctgagttcgccgtttacatgcacattcagagagaggggaccgagcagatcgttttccagcaactcgcccagttgcagactggacgttttcacgtcgcccagcacaccgcgacagccgtcgcgcagcgagctcacctgcaacaggcaggtcgcaccgccgatctcggtcgccagcgcagcatccgcagcaaaggccgtgagcgttccgtcgaatttgccggtaagaccgattttgcccgcattttttgcaatacgcagcacctcgtcgggcaaattcttgcctgtgagggcagccgccagccgatcgacatccgccgccgaagtcgtcagttcggaaatgtcggccttaaaatgcccctttccgacatcgggcagtccctgcgccgcaaaatcgaccgacagtttcgtgtcggctcccgtgcggaccgagcgcagcgatcccgacatatcggccacagggccgctcacatcagcgttcacgtcggtcagcgtcaggtgccaatccttcattttgggcgagaaataggcgatgtcgtcggacgacagcgtcgtattgacgacctgcgccgtgatgtccacctcctcgacgaaatttttgtaaagggcccagtccaatccaatcaatgaaagcgaaggcaactcgatattcgacttcgccgtccgaatgtgtccctcccggatatcgatacagccgttggcgatgcaaaggcagcccgccaggtcttcgacgacaaatccgctgcgctcgcgcatcgccaaacgcccgatgtcggtatggatcaccggaccgtcgatggtgaaattcttcagttcggcccggatgtcgatcaggtgcatatcggcaaaatccactccgtacgacggattgcggtgctccagccgttccatgcagaaatccagcccatccgtttccagacgctcgatctccagcctgaattttccctccgcccgggccttgtcctttttggagagtttatcgaccacctgcttgatgttcatctccccgtcgggagtttcgcgcaggcaaaaacgggcgtccgacaattcggcccggctgaaaacgagccctcccccgaacaggccgaggctcttgatccgggcatccagacggccggcataaagcaacgtatcccgttggaaatcctcgacatagaatccgtcgagcgaaacgcggtaaaacaagccgatatccacccggtcgatactgatgcgggtgccgagcttgcgggagattatttccgtcgcctcccgagcgacgaaattctgaacggcaggaatctcgaacaacagggcgaccaacagaggcagaaagatcagcgccagcacgatcgccgacaccatcttggccagtatgttcactatcctgcgcattatccgacaaaaccgtttttaataaattgcaaatttaagcaaatttcgggatttaacatccggcagaccggatatttatcgtcaaaagtcaccgttcgaagaacttgtcgcgaagccctcccgcaacgaccggtaaaaatccgcgcccggtacaatacagaaccgcaaacctgttgccaatcgcatttcggagtttttccgaagcccggacagagacccggtatcggctgccgcccgaaataaatacggacatcggcgaatcatttcggattttattccgtatctttgatttttattcggataattccgcctcggaaaaacacaaataaatttgcttttgcgctcggcttattcgtatctttgacatagtcttggataggatgcgcctaggaaaaaatgggaactcgttcccattttctctcggctttcactatctttgtaaagttttttgccacacaaaaatcacatggacattaccattttaggcatagaatcctcctgcgacgacacttcagccgcagtcatccgcgaccggacactcctctcgaacgtaatcgcctcgcaggccgtgcaccaaaaatacggcggcgtgatcccggaactagcatcccgggcccaccagcaaaatatcgtcccggtagtcgatacggccctgaaagaggccggcgtgacgatcgacaagatcgacgcgatcgctttcacgcgcggccccggtctgctgggatcgcttctggtgggcgtatcgttcgccaaaggactctcgatctcccacgacattccgctggtggaggtcaatcatctgcaggggcacatcctctcccactttctggacctgcccgaccgacagcttccgcaccccgactttccgttcctctgcctgctggtcagcggaggacatacccagatcgtaaaagtggacggtccgctcgacatgcagatcgtcggcacgacgatcgacgacgcggcgggcgaagcgttcgacaagtgcgccaaagtcatggggctgccctatccgggcgggccggtgatcgacaaactggccaaggagggcgatccgcacgcgttccgcttcgccaaaccccgcatcgaaggtttcgactactcgttctcgggactcaaaacctcgttcctctatacgttgcgggacgaaatggccgaagatccgaatttcatcgagaaaaacaaagccgacctctgcgcctcgctgcagacgaccatcgtggaaattctgctcgacaagctcgtaaaagcctccaaggagtacgggatccgcgacatcgccatcgcaggcggcgtatcggccaattcagggctccgcaacggcatcacggaggagggaaggaaacggggatggcgcaccttcctgcccgaattcaaattcacgaccgacaacgccgcgatgatcgccctggcaggatactaccgctacatgaacggcaatatcgcaaccctggacatcgcccccgtggcacggctcgaggagctcgaactgaccgtcgcaccgacagcggaacaataacagaaatacaaactgtcccgaccctacatacaatatttttacgggcacccgggatccaaaacttacaaaaagctccactctccccgcacagagccgcctttcgggaaaacctgaaaccgatcgaaacatccgctcaaggagaaacttacgaaaaaccgaatcgacaaacgatacggcacgatcggcgggcacgacgtacggagagaaaggagaaaatataaattcaaagcaactttaactatgaaaacattgaaaatcggcgatctgctggcccgtcttcccatcattcagggcggtatgggcgtaggcatctccctctcgggactcgcatcggccgtagccaatcaaggcggtgtgggagtgatctcctcggccggactgggcgtcatctaccgggaacactccaaagactacaatacggcaagcatctggggcctgcgcgaagagctgcgcaaagccagtgaaaagaccaaaggcatcatcggcgtcaatgtcatggtggccatgtccaacttcgcagacatggtcagaacggccatcgcagagaaggccgacatcatcttctcgggggccggtatgcccctcaacctgccgtcgttcctgaccaaaggcagcaagacgaagttggctccgatcgtttcgtcggcccgagccgccaagctcatctgcgagaaatggctcgccaactacaaatacgttcccgacgcgatcgtggtcgagggacccaaggccggcggacacctgggctacaagccggaacagatcaccgacgaacacttctcgctggagcggctgctgcccgaaatcgtttcggaagtccgtcgtttcggcacggcgcacgacacgcacatcccggtcatcgcagcaggcggcatctacacgggcgaagacatttatcgcatcatggagttgggcgccgacggtgtccagatgggcacgcgcttcgtcaccacggaggagtgcgacgcctcgacggagttcaagcggagttacatcgaagcctctcaacaggacatagagatcatccaaagtccggtgggtatgccggggcgggccatccacaactctttcctggaacgggtgaaacaagggttgaaacagcccaaaagctgtccgttcaactgtatcaagacctgcgacgtaacccacagcccctactgcatcatcatggctctctacaacgccttcaaaggcaacctgtcggcaggatacgctttcgccggcgtcaatgcctggcgagccgaaaagatcgagagcgtgaaagagctgatgacgaaccttatcgacgaattcgaccgtttcagcctgaaagaacagttggcgaaactgaaaaaataacgttcgataaaagtacaaaatccgtatgacaccttccggcattgcatgccggaaggtgttcattttcctctatctcgatttttagaacctgctagaattttacgtcgagattatttgagagctgttttcgagtagattcttttgggaaagttgcgtaaatagtggactattttcagcacctgctgaaagaagatgccgaaaagaggttcaaaaaagccgaaacattttctctcagccaatgtctaactcatttataaaattcaaaacagactcttaaacggaaaccgtccgccccggctttttatacggcgcagacacacgaatcgatctgctcccaatccaatctaaaaagacgtaacacgatgaaaatatgaataatagtcttttatttccgcaatgaacagaatacatgcggtataaaaaacgaagccgtttgttttatcctcccctcattttcactacctttgcgccaccatttttcaaccttaaaattaaccttaaaataaaaattcggagatgatcgaattcagacccgcacttctcacatccctgaagcactactcccgggagaaattcaccgccgacctcatggccggcatcatcgtcggcatcgtggccctgccgctggcgatcgccttcggcatcgcatcgggcgtttcaccggaaaaaggcatcatcacggccatcatcgccggcttcctcacatcggcgctcggcggcagtcgcgtacagatcggcggccccacaggtgcattcatcgtgatcgtctatggcatcatccaacagtacggcatcgagggactgaccgtcgccacgatcatggcgggcgtattcctgatcctgctgggactcttccgcctggggacgatcatcaaattcattccctacccgatcgtcgtcggtttcaccagcggtatcgccgtgacgatcttcaccacgcagatcaaggatctgttcggcctcacgacccccgaaatgccgggcgacttcgccgggaagtggatagtctacttccagaatttcgggacgatcgacctctgggcaacggccgtaggcgttatcagcgtcgccatcatcgccctcacgccccgcttctcgaaaaagatacccggttcgctgatcgctatcgtcgttatgacgctggccgtctatctgctgaaacgctacgccggaatcgactccgtcgaaactatcggcgaccgattcacgatcaactcccaactgcccgacgcggtcatccccgccctctcatgggaagggatgaaaggactgctgcccgcagccatcaccatcgccgtactgggcgccatcgaatcgctgctgtcggcaacggtcgccgacggcgtgacgggggacaagcacaactccaaccaggagctcatggcccaaggcatcgccaacgtggtgacgcctctgttcggcggcattcccgccaccggagccatcgcccgcacgatgaccaatatcaacaacggcggccgcacgccggtcgcaggcgtcatccatgccgtcgtactgctgctgatcttcctgttcctgatgccgctggcgcaatatatcccgatggcctgcttggcaggcgtgctggtagtggtatcgtacaacatgagcgaatggcgcacgttccgggctctgatgaagaatccccgctcggatgtcgcggtgctattggtcaccttcctgctgacggtcatcatcgacctgacggtggccatcgaagtcggactggtactcgcctgcctgctcttcatgcggcgcgtgatggaaactaccgacatctcggtcatccgcaacgaaatagaccccggtaaggagtcggacctcgagtcgcacgaagagcacctcatcatcccccgaggcgtcgaagtatatgaaatcgacggtccctatttcttcggcatcgccaacaaattcgaggaacagatggtgcagctcggcgaccacgcacaggtacggatcatccgtatgcgaaaggtccccttcatcgactcgacgggcatccataacctcacgaacctctgccgcatatcgcaacaggaaaatacccgcatcatcctttcgggcgtcaatcccaaagtacacgaagtcctgcacaaagcgggattctactccctgctgggcgaggaaaacatctgcccgaatatcaatgcggcgctccgacgggccaaagaaatagtgcaagacccacaggaaaaataatccttcgagaaacagccgactccgagaacgaaatatccccgtacccttttgcagggtacggggatatttcgttctcggcaccgcccgcccacaggcaggaatatcagggtagtgccgcaatcgtttcaaaagcctctctccagacagcatttttcctgtacacctccacactgccggcaggtacataaagaattttagcaggaaagccgaaattatctttccctagctccggcggaataacggccagacaggtaacgacagccatatcaagataacttggaaaagctcctgtttcaatcaccgtcacgccatcgggaatagttacatccgtcaatttatgacactgcgaaaaagccccgccacaaatagtttgcaaactccccggcatgataacacacgttagattatgacatcgagcaaaagcgctgctcggaatagtcgttaccccctcgggaatacagacgctctgaagactttcattctcgtagaatgcccattcaccgaacctcaccatacggtcagggaaggtgatacgcttcaaactctgacaatgccagaaagcccaatctcccatacttgtcacactttccggaataacaacttccgtcacaaagctgcataacataaatgcataatctccgatgcgggtcacaccttcgccaatcgtcaaggaggaaatcctgttcacatgcggataccaaggcggagtttccgaagtacctccatctctataatcgggcataggtccttccccggtaatcgtcaggacaccatcctccgtcaaagtccatgtaagctccccggtcgttcccccaaaaatcaccgccgccgaatcgctgccatcgcaagaagataaccctacaggaaacagcaggcaaaaacacaaagaccaaaataaaaatcttctcataagctgaaaatcattaaatccccctaaaaacagttcgtccaataaaacaattcgacataaatatataaaaaattattcaaagagcgcctattcggcaatatttgccatggtgattgattatacgatttagtgtatcccccaggatttatcaggatttagttcgtcatcgcctcattttctttacagcgacaatcacgccccaagccccataatatcgccctactaatctctttatcaacgatgtacttcgtcatagcatacaataaccacaaaatacatccgtagcaaacatgcttgatcatcatcggtggtcgctgctctatgccctgctcctccttatcctttatatgaaaatcgatttttacaaagacttttaatccaaagcgttatatgacaaaggtaatgacgggccgacggtcgccggcacaattcgtatgtttttcaacttcccaaaacaccttccctaccgggaccgaaagagatttcagaccagaaccgatcaacacgtccacgacacaccaacgggttctctctcccgcaccacacaaacctcaatcgcgaatacacacgatccgcaatctatcgcctacataaatttaacgcttttaatacgggtgtcccgcccggcgatttcacgttcgacgaggcccgtcaccacatctgcggcatcgtgccagcggttagcacggaatttccgcaattttgacacttccagcgatcttctatcatacaatcgaatttcttgctgacaggcgccgattagccgatttacaaaaaagaaagcgtggagcctatttcgtttgttaatcagaaggttgtggcaaacccatagcaaaataaacgaagatccataccccacacttgaatagatatggggtatggatacgcagaatgcgttcttgccatagtctaaacaagaaatgagtgctgttcgttgtcctttgctactgaaaactgccacattttcagattaggaccaggcgaaaacactttccatatgtctgccgcatgcgcgacaaaacaaaagtagaaaataattttcacattaaacaacactcatgtaaaaatagccgcaaatcgtgccaaaaatccctagttcccaatcccaacaactccggttctcccttcccccgtctgtcggggagcgtgcaaacggcagccgacatcctcctactccgtaaaagagaaataaatgtaaactatacttgcattattgtaaaatatactttacatttgtcttgtcaataataatcacctaaaaattaggacgactatgaaaacaactcttttactgcccaacggttttaagaaaatcggctgggcgatcttcgttcccgcatttctgctcggctgctcgatctgcttcttcggcgaaaatttcgaccgctggcttttccgcgaaacggtaatgaacaacatcgccatcatcggcacggtcgtcggcgcccttttcatcggcttctcgcgcgaaaaaatcgaagacgaaatgattcagcacatccggctcaacgctctgatggctgccatgtggatcaactacctgctcctgatcgtcgtgtctctgtcgatctacaacatcaactaccttacggtaatggcctgcggcatggccactccgctggtcatcttcctgctcgtctatcacttcaatctttacagactgaaccgcaacctgcaccatgaagaataacatccgtgtccaacgggccgtcgtccgcctcacccagcaacaattggccgaacaggtcggcgtcagccgccaaacgatcaatgccatcgaaagcagcaagttcatcccctcgaccctgctcgcactcaagatcgcacgtaccttccggcaaccggtcgaagcgatcttccaactcgaagaggaagattagaaccggtgcaacaagcacgataaagggcagcctcgatcgaggctgccctttatactacggaatattattcgtttagtattcgatcttgctccgacgaacatacccttcataccgccaccgggcattctgttcggctgcctggaaaagcgcttcggcatcctccggagaaacggccttgagcgacgtataacggacctccttgagcaggaaatcgcggaacttcgcccagtcgggttctttcgaatcgagtacgaacggattcttgccctgctcctccaactgcggattataatgccacagatgccagtaaccgcactctactgcctgcttgccgaccgtctgtgtccgggtcataccgcccttgataccgtgattgatacacggcgcataagcgattacgagcgacggaccgggataggcttccgcctctttgaggacattaaaaagttgggcctgcgaagcaccgatcgacacttgagccacatacacgtagccatacgtcatcgcaatcgcacccagatccttcttgcggatgcgcttacctgccgacgcgaatttggcgacggcacccaccggagtcgccttggacgactgaccgcccgtgttggaataaacctccgtatcgagcaccagaacattcacatccagccccgaagccagcacgtgatccaaaccgccgaaaccgatgtcgtaagcccaaccgtcgccgccgatcacccattgcgactgcttcaccaggaaatccttcaactccagtatctgccggcaatagtcgcagccgcaagcctccatcatcggaaccagacgggcagcgacttcggccgaccgggtcgacgaaacccgtgcttcgatccactcgcgcataacgcccttcagctcttcggagcaacgctggcactgggcgatagcctcttccatcagcatctgaatccgatcgcgcagcttctccgcaccgacatacatacccagaccgaactcggcattgtcctcgaagagcgaattggcccatgccggaccgcgaccatccgcattcttgcaataaggagtcgaaggtgccgaaccgctgtaaatcgacgtacaccccgtggcattggccaccatcatccggtcgccgaaaagctgggagatcgccttgatatagggagtttcgccgcagccgccgcaagcgcccgagaactcgaacaagggctgctcgaattgcaggttcttgaccgacttggtcttatcgaccaccttcttgtaaccgatatgtttggtgatgtaatcccagttcttctgctgtccgagttgactttcgagcggcttcataatgagcgccttctccttggcgggacaaacgtccacacagttgctgcaccccgtacagtcgagcggcgagatctggatgcggaacttatactccttcgtgtcgcccaatccctgtttccattcggtgcccgatgcagccgcctcggtctcggtcgccaggaaaggacggatcacagcgtgcggacaaacgtacgcgcactggttgcactggatacacttatcgacctgccattcggggacattgacggcgatgccgcgcttctcccatgcagcggttccgttctcccacgtaccatcttcacgtccgttgaatgccgacacgggcagcagatctcccttgagggcattgatcggatcgacgatgttgcgcacgaactccggacgagccatatccacgccgtgatcggccggtttcagctcgatattcgtccactcggccgggacttcgaccttcacgactgcgttaccgcccgcatcgacggccgcatagttcatattgacgatgtcctcgcccttcttgccgtagctcttatagatcgctttcttcatctcctcgacggccttctcgaaaggaatcacgttcgcgattttgaagaatgccgcctgcatgatcgtattggtgcgcgaaccgagccccaactccgccgcgatcttcgtagcgttgatgatatagaagttgatcttattcttggccaggaaaaccttcatgtgatcgggcagcgtccggcaggtcgtttcggcatcgtgcaccgagttcaagaggaacgaaccgcccggcttgaggcccttcagcacgtcgtacttatccacgtacgaaggcacgtggcacgccacgaaatcgggcgtggtcaccaggtagggcgaggtgatcggcttgtcgccaaagcgcaggtgcgaagccgtgtagccgcccgacttcttcgagtcgtatgcgaaataggcctggcaatatttgtcggtcgtaccaccgatgatcttgatcgagttcttgttggcacccaccgtaccgtcggcgcccagtccgaagaagagagcctcgaacgtaccgggcttcgccagcgaaatctcctcgcctacgggcagcgaacggaacgtcacgtcgtccacgatgcccaccgtgaactgattcttgggttcgttcgccttcaggttggcgaaaacggccagcatttgtgccggcgtagtatctttcgacgaaagaccgtagcggccgccgataatgagcggcttgcgctcgcaggggatctccttgcaggtggcgaacgcctcgacgacatccatatagagcggatcgccgttggctcccggctccttcgtgcggtcgagtacgcagatgcgtttgaccgtctggggcagtacagccgtcagatattttaccgagaagggacggaacaggtgtacggtcaccacgcccgttttctcgcctttggcattcaggtaatcgaccgtctccttcagcgtttcggtcaccgaacccagcgcaatgacgacatgctccgcatccggagcaccgtaataggtgaacggcttgtaggtgcggcccgtgatctcggatattttctccatcgcctcggctaccatgtcgggaatcgcatcgtagaacttgttcgacgcctcgcgggtctggaaatagatgtcggggttctgggccgtgccgcgcgtaacgggatgagccgggttgagcgctccggcacggaacgccttcagcgcgtcgcggtcgagcatcgcggtcagcgccgcttcgtcgatcagctcgatcttctggatctcgtgcgaagtacggaatccgtcgaagaaatggaggaaaggaacgcgtgccttgagcgacacgatatgcgcgatacctgccaggtccatcacctcctgcacggacgaggtggcgagcattgcaaagccggtctgacgcgcggccatcacgtcctgatggtcgccgaagatcgaaagcgactgggccgccagcgcacgcgccgatacgtggaatacgccgggcagcagctcgccggcgatcttgtacatattgggaatcatcagcaacagaccctgcgatgccgtaaaagtcgtagtcagcgcaccgctttgcagcgatccgtgcacggcgccggcggcaccggcctccgactgcatctcgactacccggactgtttctccgaaaatatttttacgaccttgagcggcccactcatcgacaagttccgccatcgtcgaggacggagtgatggggtaaatcgccgcaacctccgagaacatataagctatgtgggctgccgcgtaattaccgtcgcatgtgataaatttcttttctgccatttttatcggtattagattgtactatttcagctgtgaaatctgcctgaatcggcacaaagttaaaaattccaaacgaaaattccgccatatttccggacaaatatcgcaacgtacaatgttataaaaataacagtatcaacaccttctatcgaaacgcttcaaaaacaaggagaaacggccattccatttcggagcacgctttttgcaaataaaatcgtacctttgaaaaaatttgcaacaacgtgatcaactaccagaaacatacgcttccgaacgggctgacggtcgtcgtgaaccgcgaccgctcgtccaaactggccgccgtaaacctgctctacaagatcggggcccgcaacgagaatccctcccgcacgggcttcgcccacctgttcgaacatctcatgttccggggcacgaaggcggttcccgacttcgatacaccggtacagatggcctgcggggagaacaacgccttcaccaacaacgactacacggacttttacatcaccctgcccaaggacaacatcgaaacggccctctggctcgaaagcgaccgcatgacgggactcgacatctcgcaggaaaacctcgaaaccgagaaacgggttgtcatcgaggagtataaacaacgatacctcaaccagccctacggcgatatgtcgatgctgttgcgggccctggcctaccgcgtgcatccctaccggtgggcgacgatcggactttcgcccgatcacatcgccggagcctcgctcgacgaagtgcgcgatttctaccgccgtttctaccacccgtcgaacgccattctctccatctcggcagatatccccgaagagcggacgatcgccctgtgcgaaaaatggttcggcccgatcgcggacaatccgcaacctgcggcatcgcttccgcaggaaccgccgcaaaccgaatcccgacgggaggaggtcgaacgcaacgtaccagccacgatgatcgtactggcttaccacataggctcgcgcacttctccggacttcttcctgggcgatatgacctccgacctgctggcaggcggagaatcgggacgcctctatcagcatctggtcagagaacagcggctgctgggaagcgtcaatgcctacgtttccggagaagtcgatccggggcttttcgtcttcacggcccagttgctgccctcgaccaccgtcgaacaggccgaagcagccctgttgcgtgaaatcgaaatcctgcaaacggagaagatcgacgaatacgagctggagaagatcaagaacaaattcgaagcgaataccctgttcggcgagcttaacgtgatgaacaaggcgatgaacctcggcttctacgagatgctcggcgatctgcccctcatcaaccgggaagtgacgatctaccgttcgcaaacggccgaacagatcgccgacttcagccgccgcacgttccgtcccgaaaatcgttccaccctaatctaccgagccaaacaatgaaacaaccgcccctgatcactccccgcgaggtcgatgtaccccgcgcccagcgccatacgctcccgaacggagcctccctctacgccattccgtccgacgatttcgaagtcctgcgcttcacgttcgtcttccgcgccggatcgtcgatgcagcacgcgcctttcgcagcctccgcaacggccaatatgttgagcgaaggcagccgcgacatgacggcccggcaaatcgccgaacagctcgatttctacggctcctacttcgaagtcaatgtcgatcgggactacgtatatatcagcttcagttcgttatcgaaatttttcgctccgaccctcgaagtcgcggaacaaatcctcctgcaaccgcttttcccggaggacgaattgcgtgcctattgcgaaaaacgcaagcaggccctcacgatcgaacggcgcaaggtcgataccgtcgtgcgtgaaatcttcgccgaagctctcttcggcgacaaacatccctacggcatctcctatcccgagaaaaattacgacacgctcacgcgtgcagacctggaatcactctaccgccgactctatacggccgaaaactgtctggtcgtatgcagcggccgcatcggggaggaggagttgcaaggcatcggcgccctggccgaaaaactcccccgtgccgaccgcagcgccacagccgaatttccggctccccgcagcgaagcctatcgtttcgtcgaaaggcccgacgccgtgcaatcctcgctgcgcgtagggcgtctgctcttcacccgcacacatcccgatttcgtcgggatgcaggtcgtcgctacggtactgggcggctatttcggctcgcggctgatgcaaaacctgcgcggcgagcacggttacacgtacggcgtgggtgccgccatggtcaatttcgagcgggagggttacctgggaatcgctgcccaggtcggagccgaggtgacggccccggcacttcgggaaatttacaacgaaatcgaacggctgcgccgggagccgatgcccgaagaggaactttcgctggtgaagaacatcatgacgggcgaggtgatgcgcatcctcgacggaccgttcggcatcgccgacgtgacgatcgaaaacctcctctgcggcacgaacaacggtgtcatcgaagagaacatccgccggatacaggcaatcaccccggccgaggtacaacggctggccgtcaaatacctccgccgcgaagatcttatcacggccgtcgtgggagcggtcaatccaaagcatgagatttaacgggaaacgacttccttccataaaacgcatacggaattatccactttgatcttgtataactatgtaacataaagatacgaaaattatggaaagtagggctttctccctacttttttctataaatcatacaatgtttcttctaatgttttttcttgtctctttaattcctccaagtctcttttcctttgctttataatctcctttctcttacgctgttcttgtattgggatgtattcaattagataatttttgaatttatcttggctaatcgaaagttttgaagtcccgtcttttaagcggcttgttatctgctttcttattgacataaaatagaaagaatagtattccaaatctaacgggaattgtatgtgattcctttcttggagtattaggcataacgtacttgccataaatttgccatttacgtaatggcatcttccgagtgaaccttccgaattatttgcgtatattatagcctctccttccatttggtacatattatgtttcttccatttttcagaagccgtaataaagtcatattctccatcttcctcgccatcctctgattgtaattcacctgtttgtatagtaaatagcgttgaaataggataataattcatttgccctttatgctcaacaaatccataaggtactaaagtatcaccattatatataagccttttttcgcaaacgtcatatatttcttttgatgagttaattacatcatatattgcatcttctattgcattccatcttttgtatttatccacccgacctttatgttgtacactaacaaggccatcgtctaccaaatcataaaaaagcactcggtcatctttgcgatgaccgccactatctttagtgaacccaaatatagaggtatatactgttctaccttgttctctgaatgtagacaggggtagttttatcacaaaatctaaacgtgccatctttaatacatcctcagttccactccccacgtttttattcaatgttatactcggcataacgattattagtttcccatttggctccaacaactctaatgctttatatacaaactgtataggtaaatttttctcatacggtggatttataatacattttctcggcttgtatgttcgcttaaattcactatatattttagaaccaacttcaatcaagctattgccaaatatcatattacttcgcccatccccgtgcaaaaacatattcgaacaagcaagggcaaataatgtcctgtctatctcaaaaccatataattgatgcctgtgtatgcgttctattagctcatcgttccccttagcaagtttagacataacctccattgcctccatcaaaaagcctcctgtacctgtgcaagtatcaaggacaatatcatctacgcttaatcttgcaagccttaccatcagatgttttatatggtctggagttaggattatgttcttattgtcaatcttacctgctcttgaaaggaaaatcttatacgcttttcctaatatgtcttgtttttcgtcaaactcaaaaggggtaaatatgtttttttcaatttttgatatgagctctttatatggtttcaattcgtaatctatgtctaaaataaaagcaaattggcccttccaatttatctcctttgaatagctattgattctattgtttatttgattgacgattgcttctattatagccttgtttaagttgtgagattcaataagtttgtattttgaagtatcctgctgctcttttgtgggtgcttgtatattcttgtatgttattctaaagttagtatctttaagtgctatcatgagaccggcaaagaacaaactacgttctgtgtcctttatcttcatcggctcatgaaacgtattattcaattctgataaaatagtgtgtaatttttcatcagaaatgcagtctccaattttttccttcctatatatcttccttaatgattcaagcggaagtagcttccaattagtgtctatttccttgtatttccctccattaaatttgatgaataatgaagacttgtacgttcctattgtctgtccggatattgcaattgcaagaatatctttatctatcttattgacctttgcgtaaaattcaacttcctcgcaagcggctttataatcatccgctttcgcctccacgataatcacaaaatcctcattcgcattatctctaaagaaatcgggataacctttatatcccgtgcctttctttgatttgaatccgtaatgggacggtatggctgatttttctataaatgctccatttccgtaaaactctctgaatatgttttcggttatagtctcacttttactccctcccctcatttgtaaattattattcttcataccgttatactattgcgagttcaacaagtgaggtaaaagcctcgttattatccctgtggttaagacggtagtagaactccgtcacatacttctgtatatacttgactgatacgttatggaacactccatatacgcgtcgtttgagtatcgcccaaaaactttctataccgttggtgtggattccatctccgagagagtatgttacagtatggtctattttaagacggacgaagttgcgttcattcttcttgtcaagaatgttgtaccctgagaattggtctgtcataacagtattgttgcccttgcatacttttttgagaacggcgaaaagttgtttgccattcaattgttttccctcttcattattataattggcgacaactgcgtgaaccttgcccgtgttgcgcccctttacaccgattccaggtgttttcgatgttccgcagcctcttttcggcttgttgtcctcatcgtccgaatggtcgttatttttgcgaggcttgccgcctaacataagtctcgtctatctccacgactgcctcgaatgtttccttgtattcctctttctccatcgccttacgtatctgctggagcatacgccacgctgactgataagaacccatgcccaactcccttttcaactgcaaagcagatattccttttcgggacacaagaacgagattcatagcatacagccacatacgtaaatcaagatgcgtgttctcgaatatcgtacccttcaatgcggaaaactcgctcttgcagttattgcaatacaggaaacgatgattatacttttgatggtatatgcctttgtgtacgcttccgcatttcggacagacatagccgtctttatacttggccgcaacaatgaaatctatcgcgctgttctcgtcagggaacctctttgtaaactcaaagtatgtcatatctctttgcttttgataatgcaaaggtacgactttatttcggattatacaagattaaagtagataattcagaaatatattccgttcgcatccacccaccgtgtcagttcgacgaaatcggcgaccgaaagccgctcggcacgctgcgtgaagaagggatgttccgcccctccgaaatcgccgaaagccgcccgcagggagttgcgcaacatcttgcggcgctggccgaacgaggccttgaccacgcggacgaacaaccgttcgtcgcagtcgagccggtccactccgttgcggcgcagacgcacgacggcgctcttgactttgggcggcggattgaacaccgtttcattgaccgtaaacaggtactctatgtcataccatgcctgcaacaacacgctcaagatgccgtactccttcgagccgggaggctccgccagacgcacggcgacctctttctggatcatcccgacgcactccggaatcaagtcccggttttcgagcaccttgaaaaatatctgggacgaaatattgtaagggaaattgccgatcacacgcagtccttcgggaaacagcgtccgcaaatccattttcaggaaatcgccctccataaggcggggtgtaaattcgggataatgcgcatgcagatacgccacgctttcggagtctatttcggcgccgtatgtcacgacatccgtccgtttcagcaaaaatcgggtcagaacacccatgccgcatcccacctccaacaccggacacggtttttcggacgtaccgccgcccagcgaatcgcatattttgcgggcaatattgagatcgaccagaaaatgctggcccaacgctttcttcgctcttacttcactcattcgtttcggttgaatatctttcccggagcctctatcccggactcttccggcacagagccgatcttctccgtctctgccgacggcgaccgcttcgcgcctaccgtccggcacctcccggagcggacgccctcttcggccgcttatcggaaacgtcgtaccctttctccgaacaccgtcgggtgcgggacgcgcacccgttcgattccgctccgaccacagaaacggcccgaagccgcatccgtcggccggcatattttccttcaccggaccggctctcgcccaacgacacccctctgccctgatttaccggccgcagaaagcttcggactggcctttcggatgacacaatcatcagaggtatttcttcacatcctcgacatgcttgcgaggtttcttgtgaaattcgttgtaaaacattgcgacgcccgcgacgacgaaaagcaccggaataatcaggtttgcataatgaccgtcgtgcaagcaccaaacgacattgatcgtaagccacatgatcgtagccagcataaaaatcaacgcgacggtcgccgtcttcttgttaaattgtgcgttcttctttttcatagcttctcgatttatggttaaacgattctcatttgcttttcttccgctcccgctccctgcgccggtaatccaggataagggccgccagactcccgccgagcgccagcaccaaaagtgcgcctccggaggtcggatgtacgaacagacatacggccgtcaccacgatcataatcgctatggatgtcatcagtattactctgaatcgctgcaatctataccccatatctgcataagttcgcgggatttcccgcactctgttatacataaggaacgcctctgcccgccccgtcagttgccctgttcgcacatgaacttgatacgtaccagccggatctcctcctcggtatagtcgccgcccagctcttcgatcgcctcgtcgagcgaatcgctctgggcatcctccttgaaatagaggtaaatatcattggatttatcctcgtcgatcacctgttcgatgtagtaggaaatatccagtttcgttcccgaattgacgatcccttcgatttcggtcagcaattcgtcgaaatcgaggtctttggcccgggcgatatcctcgaaatccatcttgcggtcgatggcctggatgatgaaaatcttgttgccggacttgttgcccaccgacttgacgatcatatcctgcgggcggacgatctccttctcctccacataggcgcggatcaggcggatgaactcctcgccgaacttgcgggccttacccacacccacgcccgagatgttctgcatctcctcgatggtgatcgggtactggatcgccatatcttcgagcgacggatcctggaagatgacgaacggaggcagatcatgctgccgcgccaccttcttccgcaaatccttgagcatcgagaacagctcctcgtcggccgcccctcctttacccgtaggagccaccgcatcggtctctttctcctcctcgtcgtagtcgtggtcgagagttatatagaccgggcggggtgcggcgatgaactcctctcctttggcattgatcgacagcaatccataattttcgatattcttatcgataaggcccataatcagcgcctgacggatcacggctccccaataacggatgtcatggtccgcaccggccccgaaccattcactcttgttgtgtccgtaactcttgatcaacgcggtattcttaccgaccagcacgctggccaggtagtccgccttgaatttgtcccccagatcgcgcaacgcctcgagcgccatgcgaagcgacgcctgggcgtcgatcttgggtttggggtggaggcagttgtcgcagcagccgcagttctcctcaggatattcctccccgaaatagtgcaacagcgtcttgcgacggcacatcgaactttcggcgtacgacacggtttcgagcagcagcagcttgccgatctcctgctcggccaccggcttgccctgcatgaacttctccagcttctgaatatccttataactataaaaggtaaggcagtgtccgtcgccgccgtcgcgtcccgcacgccccgtctcctgataatatccctccagagacttgggaatatcgtaatggatcacatagcgcacgtcgggtttgtcgatacccatgccgaaagcgatcgtggccacgatcacgtcggcccgctccatcaggaagtcgtcctgattggccgcacgtgtctgggcgtccataccggcgtgataggccaaagcccggatgccgttggctacgagcaactccgtaagctcctcgaccttcttgcggctcaggcagtagatgatgccgctcttgccctcgtgctgcttgatgtaacggataatctcccggtccacatcgtgcttgggccggatttcgtaatacaagttggggcggttgaacgacgacttgaataccgaagcgtcgctcatacccaggtttttctggatgtccatctgcaccttgggggtagccgtcgccgtcagggcgatcaggggcgccgtgccgatctcgttgatgatcggacgaatgcggcggtactccggacggaaatcatgcccccactccgaaatacagtgcgcctcgtcgatggcgtagaacgaaaccttgaccttgcgcagaaacgccacgttatcctctttggtgagcgactccggagcgaagtagagcagcttggtccgcccctccaacacatcgttgcgcacctgcgcgatggcactcttgttcagggaagagttcaggaagtgagcgattcccgcatcgttagaataggtgcgcatggcatccacctggtttttcatcagggcgatcaacggcgatatgacgatcgccacgccgtccatcagcagggcgggcaactggtaacacaaggacttgccgccgccggtaggcatcagcacgaacgtatcttttccactcaacacattgcgaatcacggcttcctgattccccttgaatgaagagaagccgaaatattctttcagtttctcgcgcagcaaggaatcttcattttgcttcataactcttctcaaacacaaatttcaatgtaaagataaaaataattcggaaaaaaacataactttgtaaaaaaatttcataaaaaatgcgtctttacaccagcgagctcgtcaagaaatacaaagcccgcaccgtggtgaaccacgtttcgatcgacgtgaaccagggtgagatcgtgggtcttctgggtccgaacggagccggcaagaccacgacgttctatatgatcgtcggcctgatcaaacccaacgaaggccagatctttctcgaagacgacaacggccaggtagccgaactcaccaaagagcccgtctatcgccgggcccagatgggtgtggggtatctggcgcaggaggcctcggttttccgccgtttgagcgtcgaggacaacatcaaggccgttctggagatgaccgatctgaaaaaggacgaacaggccgcacgctgcgaagcgctgatcgaagagttccgccttcagaaagtacgcaagagcctcggcatccagctgtcgggcggcgagcggcgacgtaccgaaatcgcccgcgccgtggcgatcaacccggccttcatcctgctcgacgaaccgttcgcaggcgtcgatccgatcgctgtcgaagacatccagagcatcgtcgctacgctgaagaacaagaatatcggcgtcatcatcaccgaccacaacgtcgatgaaacgctggccatcaccgaccgtacctacctgctgttcgagggtaaaatcctcaaggcgggttcggccgaggagctggctgccgacccgatggtgcgcaaggtctatctgggacagcatttcgaactgcggcgcagtccgacgctcgacaaactccgcaagggacaacccgcgagcgcagccgaagagaatccgtccgaggagaaatagaccgtacccgccttctgtcgggcaatgcccggcggatcggcctcgcggaatccgcccgactcctgcctacgacggtacgaacccggaccggaatccggaaccgttttccgcctgcggcaagcgcccctcccggcaagcccgggaagtccgaaacgaaatccggaaaggattgcggactcgcaaccgattccgggagcgcatcccggaaaaaacaaacagacaaccattttcgaacaccggtttgcatcgtacagttcgcgcgaatcattccggattcggaaaatggaaagcgaaacaacgactttttgacaagtgccgcaacggactaaactccgaactgccgcaccgaaaaatacagtaattatccgtatatggatcaatccgttcccccggggagggttcgaggcatttgcattcccccatgttccaaaagttacgcacagcgcgccctggccgcctcgctgctggccgaaggtacttcccggctgcataacatcgaattttgcgacgatacccgttcggccatccgctgcatcgaggcgctcggtgcccgggtacggcgcaccggagagcgcacgctcgaaatcgacggcggcctctcccccgcaggcgacaaactctacgtcggccagtcggggctttccacccggctcttcaccccgatcgcatccctctgcgacacgccgatcggagtggtgggcgaaggaccgctgctgcaccgctcgttccggacgatgatccgcacgctccgggcactgggcgtccgggttcacgaccgcaacgaccatcttcccctccatatccaaggcccgatccggggcggcgaggttcaggtagaggggctggtttcctcccagttcatcacaggactgctgctggccctgccgatcgccgaagaggagacgacgattcacgttccccacgtaatatcgaccccctatatcgacatcacgatcgacacggccgagcgcttcggcatcgaaatcctgcataaagactataaagaattctacgtggccggaggacaacgctaccggcctgccgagttcgaaatcgagagcgactggagcgcggccgccttcctgctggtggcgggggccgtcgcgggtgaagtgacgatccgcaacctctcggtactctcccgacaggccgacacagccgttatgactgccctcatacgggccggcgcatccgtcatcgacgagggcgacacgatcaccgtcgcacaccgtccgctgcaagccttctcattcgacgcgacccaatgtccggggcttttcccggccctggctgccctggccgcttcagccgaaggaacgagcgtcatcaagggaacctcccggctggagaacaaggagggcaaccgcgccgagtcgatccgcgaggagtacgccaaactcggcatcgaggtcgatctcgacgaagaggatacgatgaaaatccggggcggacgcatccggggcggacacgtgcacagccacgacgaccatcgcatcgccatgtcgctcgcggtagcggctctgaacgccgacacccccgtcgttatcgaaaatcccgcatgcgtggccaagagcttccccgacttcttcgaacggctcgaatccctgcgtactgtggaataaacggaccgactatgccgacacgccgggaaatcatcgcacggatcgaaacgccgctcaccgccctctacggcgagcgcgaagcgcggcaaatcgctcggatcgttgtgatggaactcggcggactctgcctgaccgacctggtcgccgaaccggacaaggagctcggaatcgacgaactcgaccggatcatcggcgaactggccgccggccgtcccctgcaatacgtactgggacataccgaattttacgggctcgatttccaggtgcgggaaggggtgctgatcccccgtcccgaaaccgaagagttggtccgctggatcgccgaatcccccgccccggacaatcccgccgtactcgacgtcggcaccggcagcggctgcatcgccgtcacactggcccggctgatcccggagtcccgtattacagccgtcgatatttccgaaaaagccctctccatcgcccgcgaaaatgcccggagactcgatgcaaaagtggatttccgacaaggcgacgccctcggggagctattccccggacaacgggaacagttcgacctgatcgtttccaatcccccctatatcccccgcagcgaaaaagcctcgatacgcgtgaatgttacgggttacgaaccggcggaggcgctcttcgtcgaggacggagatccgctgattttctaccgggccatcgcccgcaatgcccggcggctgctccgtcccggcggacggctctatttcgagatccacgagaatttcgcggacgaaacgttccggatgctgacccgggaagggtttccggataccgccgtgcgccgcgacctgaacgacaaaaaccgcatgacatgcagcctgcaaagaagataaaacgcgacaaaacgcccgaacaggcttacgcggccttgatccggctctgtgcccggagcgaaaaatcctcgggcgacgccctgcggctgatgcagcgctggggcgtggagccttcggcccggcagggcgtgctgcaaaagctcctcgccgaccgattcatcgacgacaaccgctacgccgaagccttcgtgcgcgacaaaatccgactgagcggctggggcgcccgcaagatccgcacctcgctccggctcaaaggcatcgccgcagcgatcatcgatgaagctcttgcccgactggatccggcgaaccagtccgaacggctgcggacacagctcgaaaaaaagctccgactgacccgatacaaagatacttacgatttgaaaaccaaactgatccgctacggcctttcgctcggatacgactacgacgccgtactcgatgccgccggcgaattgatccaaacaaacgacgaaccatgcgacgacttctgatctccgcgctgctgctgtgcagcgctcccgtttcggcccagcacctcgccccggaagattacatctttcccctgcgagacgtggccgggctttactccgccaacttcggcgaaatgcgtcccaaccacttccattcgggcatagacatcaaaaccgacggcgtgacgggaaaacccgtactcgccacggccgacggctatatctcacgcatcgccgtcacgccgggcggctatggacgcgccatctacatcacccatcccaacggcacgacttccgtatatgggcacctctcgaagttccgcgacgacatcgaaaaatacgtacacgaggagcgttaccgcacccggcgaaacagcatcaatctctatccctcggccgaccggtttccgctcaaacagggcgagcagttcgcctggtcgggaaatacaggctcgtccgcaggcccgcacctgcatttcgagatccgcgactcccgcacgcagcggaccctcaacaccatttccagcggcgtgatccgcacccgcgacgacattccgccgcgcctggtgaaactctactacgtcgaggtggacagcgtgcgcggtgtcccggtgcacgcccggccccgccccgtcgagctggtcgaaaaaacacccggacgctatgcgctcaaacaggaaggagcactctccgtcggcggccgaggttacttcatcctggagacgaccgaccgcaaaaacgacgtatccaacacattcggactctggcgcatacgtgaatttgcagacgaagatccgatcttcgaacttcgtatcgacggcttcgccttcgaccagacccgctactgcaacgccgtcacccactaccccatgcaggtcgcctcgcgcaacgaagtgatccgcctcacccgactcgacggctgcatcgacgatttctaccccgtcttgaaaaaccaggccctgctgactccttcggaaggccagagccagcagatccgcatcgaagccgaagacgacagcggcaaccgttcgatactcgaattccggacgatccgacagcctgcgcagcgggattttcgcgccgtatgcgattcgacggctctcatcgtcgataaccgccggcccttctcgcatacagcgggagaggcatcggttcacatccccgccggcgtcttctacgaaccgctctttttcagtcagtcgagccgcccggcccaattcgccgccgcaccgtcggtcgccgtcctctctcccctctattcgatcctcgattacgacacgcctctgcatacggcggctacggttacgatccgggcatatgttcctcagaacttacaaccccacaccaccctgggtttcgtccgcaaagggaaggtttcctatgccggaggaaaatataaaaacggcgccgtcaccctttcgacccgcacattgggcgacttctgcgtggtggccgacaccgttccgccacgcatcgagccccgcttcaaagccggagagccgatcagaacgcgcagcatcaccttccgcctgcgagacaacttctccggcataggcagctatacggccacactcgacggggagtggatcctgctcgaacgcaatccgatgcagggcaccattacccacaccttcgacgactcccgcaccccgaaaggccggagctacacgctccaactgaccgtcacggacaactgtggcaacaaaaccgtctggaaacggacgataacccgataacaataccgatatttacatacttcagacactgcccgcaacattcagacggccgaccggaaaatcggccagagcttttttcagacaacgcactgccggattacacggctccgttcatcttcggtccctggcgaatcctctcacaagcccggcacaccatgacaacgaaagatccgctaaacagttattgtttagcggatctttcatcgtttttctcaagtgattccggagcggttcgaacgctcgacccacagcttagaaggctgttgctctatccaactgagctacggaaccatcgtttgcagcacataatcgcacagcgcagcaaaggtaatacaaaatcctcgcttatgcaagcaacacgacaagttttacctcttatccagcaaggtatcaaatagttaatacaacgatttaatcgacgaccgcaccccgtctgcaaaaattgccaaacgcagattcccgacgatatggactcgctcgaatcagattctaccataactgacaggatgaaagcggcgtctgggggaattatactacgaagaattaaccttcaccgaagacgatcagtgcgatccgaagagtgctccaaactcgggatttatcaacggcaaatcggcggttacgccaagccgtaccgccctgatcgcaaccgccttcactgcacctgtccgcttctgcaaagcagccgaatacgaccggacaccccatcttttaccaatttgatccattttgtttcccggcagatttggcaattccgttttttgttgctacctttgctcccctgaaagccccggaagtgggtagcgtttattattttacttaaaaatttttatagcaaatggctgttaaaattcgtctggcacgccacggtaagaaaggtttcgctttctaccacatcgttgccgcagatagcagagcgccacgtgatggtaaattcatcgagaaattgggtacctacaatcccaatacgaatcctgctacgatcgatctgaacttcgagaaagctctggattggttactcaaaggcgcacaacccaccgacacctgtcgggcgatcctctcctacaaaggcgtaatgtacaagaagcacctgctgggcggtgtcgctaaaggtgcattctccgagtcggacgccgaggccaaattcaacaaatggctgagcgagaagcagaccaagatcgagaacaagaccaacaaactggcgtcggacgccaaatcggccgagaagagccgtctggccgccgagaccaaaatcaaggaagagcgcgcagccgctctcgccgagaagaaagccgctgccgaagctgccgcacgtgaggccgccgaagctgccgctgccgaatcggctgaagcagcagctcccgcagagggagaagctcctgccgaggcatagttacaaccgttatgttgttgtcggttgcgcgcgtgagtaaactcttcggagttgaaggtggggttttactgaatctctacacgacgtttcccgatgacttctcaacagaggaaccgctgttcgtgaagatcgattcactggcggttcctcttttttgcgaccgcttcgaacggaggggcaagaccaacgcattggcgacattcgcggatatcgactccgctcgtcgggcggaagagtttatcgggcgggagttgtacctcgagcacgaggacgacgaaaacgatgaattctacctggaagatttgatcggattccgggtacggatcggtacgttgaaaggcgaaatcacggattattacgacagcgaggccaatcccctcttcgaggtggagatcggcggcaaacggatcctggttccggcggtcgaggagttcatcgcaggcatcgatttcgagggccgtacggtgaagatggtactgcccgagggactgatcgaactgtaacgagaatcggtggaaaaccggtgcttccgtgaccggatatttccggcaaaacgcgcctttcggtgcggtcgaaaagtaaaatttgcgcaaaaagtatggcacgtgtggttatcggactctccggcggcgtcgattcgtcggtagcggcctacctgctccaacaggccgggcatgaggttatcggactcttcatgatcaactggcacgacactacgggtacgctcgaaggcgactgcccctggcacgacgaccggctcttcgccgaacttgtcgcgcggcggctcgacattccgttccatacggtcgatctctcggaccagtaccgtcgccgggtggtggactatatgttctccgaatacgcgaaagggcgtacacccaaccctgacgtgctctgcaaccgcgaaattaagttcgacgtttttctgaaggaagccctcaagctgggtgccgatttcgtggctacgggacactactgtcgcaaggccgaagagacggcacccgacggtcggacgatctacaaattgctcgcgggaagtgatcctaacaaggatcagagttattttctctgccaactttcgcaggaacagctttcccgggcgctgtttccggtcggccacctgctcaaacccgaggtgcgacgcatcgccgagcaaatgaagctcgccacggccaaacgcaaggattcgcagggcatctgtttcgtcggcaaggtcgatctgccggtctttcttcaacagaagctcgaagcgaaaaccggcaatgtccatgaaatcaagtccgactggtccaaatacggccaagccgtctcactcgtcggcaaaacggaggaggcaggtatgggcacggcggagcgaacagtcgcggataaaagcgccattccttccggtatgaatcccgcgaatacggattcgacggaatgtccgaacccggcgacagctccgacggcaaccgctgcgaagcgttcctccatgccgacggatgcggagctggccgcacttgctgctccttaccgttataccgtgcgcgacggtaaaaaaatcggacagcacaacggagctcacttttataccatcggccaacgcaaagggttggggatcggcggccgcaaggagtcgcttttcgtactggcaaccgacgtggagcagaacgtgatctacgtcggcgagggggacgaccatccgggactttaccgccgggccttgcggatcgctcccggcgagctgcactggatcgacccgctccgggaattgaaaacgggcgaaagccgtcgtttcgatgtccgtatccgttatcgccagccgctgcaaggagcggaactcttcatccgttcggacgcggcctacctgcttttcgacgaacctcagcgcggaatcacgccgggacagttcgcagcctggtacgatggcgatgagctggtcggatcgggcgtcatcgccgaataaccggacttcccccgatagcgtccaagcgaccgccgcagaagaagaagctcataaacacgggccattttaccgaaaccccggcaaaacaggcgacaaacagtcttcacaaccctccgctccacgctcaaatacaggcagccatcacgtaccgtaccggccgatttccgacaagcatttccctcccaagcccctttccacaaggaggcaaaagaaagggacagcccagaacacgcccccggcgaacgatgacaaacagcctcgggaaacaagtctgaaacccgaacccaatataatcgccatacttgttgcggcaatcggaattatccccccgcttcctcgatcgtccgcgaaaagggaacgggaagacggttcaccgagcatcgagcgccttcgggatcgcggttttctggtgctgaccgatccctcgcagctcgataccttgagccggggacctgtgatgggattctttaccgacggtcacctgccgaaaatgtcggaggggcggggcgattatctggagcgggcgacccgcaaggcgctggagattctgttgcgagaagccggcgagcgcgatcggggctttgttctgatggtcgaaggatcccagattgatttgcgggctcacgataacgatgccgaaggcgtcctgacggagatgcgtgatttcgaccgggcggttgccgctgcgatggatttcgccgaccggcatcccgggacgctcgtggtcgttacggccgatcacgaaacgggcggtctttcgattccttcggccaatgtcgatttcgagcacgaggaggccgggatcgagtactgtttcagcaccggcggacatacggcagcgatggtgcccgtctatctgtacgggacaggcgccgaacggattaacggcgtactggacaacacggaactggcccatatgttgaagcgacaggtattgccggataacagacgaagtgtgtcggcaatgaaaattaaatcatcaaagattattcatttaattcataaaacagttcgctcctatttctgtcaagcctgtaggtaattggttttgtcctttgtcgggtaaagaacgtgaatgataatctaaatttgtttctgattatatattacctccactattccattgtatttcttagtttcaaccaaagtcaagtcaatctttcgggtaaaaccaccaaataaactgatgcctccacccaaaataaccggaatgacaaccagatgataagtatctatcagattatttgatatgagttgctgcgccacctctgcacctccgcaaatccaaatgtttttacctgatttctgcttcaactcttcaacaaatcggcacacatctatattcttgaaacagatattttttgtgttgtcagtttctttgtgatgggtcaagacgtaggtcgttgctccctcatagggccatcggtcgggtgaaagttcggtcacaatttggttgtaggtctttcttcccataatgaccatatccacgccactgaagaatggtgtaaaggtatcttccatctctacgttttcatcatgtccgcctatccaatcaacggcacctttgccatcagcgatatagccatccaaactgacggcaatataaagtattacttttctcatagtctgtatcattattgttaaagaggtaataccatttcaaactgtttgcttgccaagggaatgttcttgcttttgagaaaaacaggcatggttggattgtcggaactgatgttcaagactttgatgaagtctgttttcagacgcgctatgacttcttgcaataatcgggaggctattcctttcctgcgatattcgcttagaacgactatttgagtcaaatcacctgtatgaatgtcaaacacacagtagccaaccatcttcccgtccaagaaagccccaaggcacgtcagctcggatatccctctttcaatggattcaaagctgttttgccacgaaggactaaagtcgcaatagcgttgtgcctgtctgatggaattggtatcaacctgctctatgatacagtctatgtttacttttcgattgtcaatgtgctcaatcgtttgtctgaaacagtcaaattttcgtgttacctcaaaattcattcggcgataaacgccaatcgctttttggttgttttgcaggacttccaacaggtattggctgatacccgattccttgagaaaagggagggaatgagtaaagattttcccggctatactctgtcctctatattgctttatcgttccagtccctgtatcataggcagtaagaacaccattgaatgttcctgttccgtttaaggtgaatgctacaatttcgtcattatcaaaggcggcaaatgataattgtggattatatccgcgccgtttgagcatggaacgcacctcttctttctcaaaatgtatttcataatcggcaaatgcttttttaaagccgtgaaagatggtttcaaaatcggtatgttctaaattccttatttccattttggtctgattttaaagtttaatctgatatattcttgtggtttccccccaaggatgatggcagtttcctatatatcgaaaaccgaacttttcataatacccgacatggtctgtacacagattcaagtatttgaaaccataataggaggcatcctgcattgctttatcaatgagccattttcccaagtttctgcccctgtaggatttttcaatgtacaatgccgccagccagggatacaaatccatccgtgagttgaagtcgttggtgaccagtccggcacatccggcaatggcatcatggtcgagcagcagataccactgtggcaacaggttttctgcattcaggcagttacgaaaacaatcgtcatacaccatattggattcttccgaagcccacttgttttgaaagtaggctatcgcagattcgagatattctgttgactgtcgcaatgatattatttgcataaaattattgtttgtgaaagttccggattttgtttgctattcaatgtatatctgatccttaccttacggattgttcccgttctgataaatttctttttcatactaatgaaaagtgtctttccagttcctcaaagacttttaaacatcgaagcgtggaactgcaatatatgttttaatatggtgtatgaaaactcgaaaatgaaaagaaaagccaaacaagtgcaaatataaccgctaatatacagcgttttatgtggtatcagatttggggctgagtttttaatttgtcttaatccgtttcaagtttcttcgggatgtatgggaacatatacgggaatttatatacctttgcaatgtgaatcaaaaacgcattgtcgatgaaagtttccgtctatctgaaaaagtgttcctccacgacctcgaacatctgcttccgggtgcgtgagaagaacgtggatataaaggtcgtttctccccttactgtatatgacaggtattgggatgccgacaccctcagttacaaacgcactgcggctgttcctgccaccgaacagaaacggctgcccggacagattgcggtcatcatcgagcatgttgaaaacaccttctcggacaaggcggacagcaaatggttgaaacaggccatcgagaatgtgctgtaccctgcccgtgctttcgagcgcaaccacccgaacctgctccgcagaatccatgagtatctggagaagtttgacggtgcggacagaacgaaagagcatatcatccgcttcgagcgcaagatgtcacgttatcacgactatcaaagggagatattaggcaacagcgactttatgctctttgtggagacggtaacactggaacagatgaacgatttccgggtttatgtcgtaaatgaacatctgctgcaacaggagcatcccgatttctatgcctcacgcctgctcatcaaacgcaagcccaagccgctttccggcactaccgtcatcaacatcatgaacctcttctgtaccttcctgcactggtgcaagaagatgaagtattccgacaatgaggtctatgcgctctacggctgcaaggagccaacatacggcgaccctttctaccttacatccgaagagagaaatatcctatacgacgcggatttggacgacaagtccagactggctgtcattcgtgatattttcgtatttcactgctatgtcggctgccgtgtgggagacctttaccggctgacaggagacaacatcaaggacgaatttctggaatacatgccgcagaagacgaagaagtgtcaggcaaagaccgtaagagtccccctccacgaaaaggcattgaagatactggaacgctacgatgcaaatgcggaccgactgtttccgttcaaacctatacacacctataatttgggcatacgtgaacttttgaagcattgcggaatagaccgtatggtcaccattcttgacacacatggctataatactgtgcagaagccattgtatgaagtagccaccagccacacggcacgcaagacattcgtaggcaacctgtacagacaggtacccgacccgaacctgatagcttccttgtcggggcatgtggagggtagccgggcattcaaccgctatcgaacgattgatgatgacatgaagcggaaactggtagatatgataaactaaggaggacatatatatgaaagtgacggcattcatcagaaagacatcggccaagaacaacgtgacggatctggcgcgtgtctatttccgtgtccgagacatcggaggagtggacatcaaggctgcaagcgagctttccatcaaccccaaccactggagcgcggagaaacagggttacaagccacgtgtggctttggtctcggaagagaagcggatgaacttcgacagggacatccagcagataacccaccttatcaccaaggagtaccaccgtggcgtggacggcaactggctgaaagggctgatagaggaataccaccatcccaacatcaatgcgaggggcggcaacaaggcagacgaatacctgctgtcatatcagattcagaaatacatggacgagacacctcttgccgatgaaagctggaaacatcaccgtgacaatctgaagaaggtgctgcgctacgagcgtttccgccatgaagtcatgcaccagcgaggatttctcctttgcattgactccattaccgctgacgacatccgtgatttcaagttctggatgcaggaggagtataagtacgtggaaatgtaccctgtattttataaagacgaattgccccgcgatgttgcccaacaacgttccgagaacagcatgtcgggaacactctaccgcatccgtaccgtcatcaagtggtgcatcaagcgaggactgacgagaaacaaccctttcgaccagtatcagattgcacagccgatgtacggcgacccgttctacctgacccttgaagaaagggacaaggtgtactatgccgatttaagtgaaatgggagccacctatccgatctatcgggacattttcatgttccagtgcctgataggctgccgtgtgagtgacttgaacagacttaccaaggcaaatatcgtggacggttgtgtagaatacattccgcagaagaccaagctggaacacgccaatacggtgcgtgtgccgctcaaccagaaggcattggatatattggaacgctacaaagaactggaagatgcgttgcttccacggttctcccacttcggctataacaagaagataaaggaaatcctcaaatatgtaggcatcgaccgcatggtgagagtcctcgacccgaaaacgcgcgaggatgtggcaagacctttatacgaagtggccaccacgcatacggcacgcaagacgtttatcggcaacctctacaagcaggtcaaggacccgaacctgattgcctccatgtcgggtcattcggaaggaagccgggctttcgcgcgataccgcaagatagatgacgagatgaagaaggagctggtgaacctgttggattgattttctttatatccctccttttataattatcatatttcactgacatataacgaatatggatgagcagaaattgacatacgagcagttcaaggcggacattctccaatggaaaaacacgcaccgggaggaatacagccgcttcgcacgtctgatgaccaacggagacgagaggcagtacctcgccatctgtcaggccatattcaggcaactgcccggaatcaggcgtgaatgggaactgtcatggaacgatgacagcacggagggatttgagaacattgatctgcagttcaaggagaacgcagtgcccagacagattgtggagttgtaccgagaacagagggatgaggataatcctttgcccgatgtgacttctcccacaacactatggggtaggataaaatccttttttggcagtaagcccaaagaaccggatgtcattctttccgcaccgcttgtgctgagctggctctattacggcaagagtttcgaagcgatggtgggcatggtcagcaggcaggctaagaatccaaaggtggacagtgcggacaggcagagctgttcctttgtcgccagacagattatcagtgtgtctataaagaatggcttccgtacccaagcggactgggacaggtactttgccatgaacaacgccattgagagcggtcatatcggagaatgggcgttgcaatcggtggccgatgatatgaccggtgaaaccgagccgtccaaacataccggcataagccaatccgtcactgaatctgtgaacgaatttacagctacaagtgatgtcccgaagtcgcgagggcggcagaaggcaaaggaaattcctcttatagattatcttgactgtgacaacaaggaagcagtcatcggagttatctggaaattcatctccaagtatgatacggctgcggaacaggctttgacctattacgccttgaacgaacttgggctgctggtcggtatgggcagcgcaaaggagttcgccgccgcactcatccgccagttcgagggtatgggaagcatgaaaagcgaaagttcctaccgtcaggccatccacatactgacaacaacgcagcacgtcatgaaagacggagtgaataggatgtgtgtcatgctcaatggcgacatttgccagacattgttggccgaactcaaggctgaacttacgggagcagtgaacggcgctatacatccaccagcagacaaacctcccgaaatggggtaaaataaagcggtttgggagttgtcacaattgtcttttttgtcataacaaatatgccaactcgttttatttcaattacttttaattcgcctatacttttgcaccgtcaatcctttcccgagggtcggcggtgcttctcttttataagccatcggaagcggagcatcagggaacttttgaagatggtcatcacaaacttcaaaattgatatttatgattaccatagaaagtctggtcgaacagggagcaaacgtaaagctggaagtcactcccacagacctcaagatgtttgcagaatccatcgtgcagcgtaccatcatggcgcagcaggaagagcagagagccgccatattgcgtgaagcggaagagacctatctcaacacaaggcaagtccgcgaattgttgaacgtatgcgaaggcacactcaacctgtgggcgaagcgcggctacctcgtacccgtcaaggtcggcaacaagaacatgtatgccaagtccgacatccgcagggtacagacaggaaacaagtccgagagtgtaacatcctattgcaagaagaacaatggctgacatgaaaaacacccggcttgaactatgcaaccgaatccgtatggaggcggagcataccgaagatacaggatttcctctggatgtgtttccccagaccatacagtccattatactcgatatggccaaatacgagaactacaagacagagttcatcgcaacgtccatgctgtcggctgtatcaacggcattgggcggtacataccgaatccgtatcaaaggcgactggcagagcaacggcgcactgtatgtcattatggtaggtagacccggactgggcaagactccaccgctggaagctgcctaccggcctctccgaaaacatgactatgccctgttcaaggcatacgaagcggaattggagtcgtggaaagctgtcggaggaacaggaaacaagcctgtcttgaaacgaaccattgtatcggacttcactcccgaatccctgttgcagacacacaacaacaatccgagaagcgttgtcattctagtggacgaaattatgggtatgttcaattccgccaaccgctataccaacggccagctcatagaacagttgctcaccgcttggagtggtggggctttggatgtgacgagggtaagcagtaccactccgattcatatagaacggccatgtatcaatatcatcgggaccacgcagaccaaacggattcacgaactgcttacaaaaggctttgaggagaacggactgcttgaccgcatcctgttcgtattgcccaaatcccccgaaatatcgcaatggatagaccgggatgatgacggggaaataacatcatcggctgcggcgcgctgggagaaaatactggacaaggtgcttgccttggactatgacaccgggacagaagaaagaaccgcccatgtactgtctatggacaaggaagccaaggggtacttcttttcttggtggaacgggaaagtggagcgtatcaaccggatagaggatgatgccgaggttgacagccgcgagatgaagcatccggctcatgtcgcacggctggctctgattatccaagtcttgcgttatgctgccgatgaaagccatttgcagtttgtggatatggtatcggtgaaatccgccatccgtttgaacgattatttcgaggattcatacatccgcatccgttccttcgtggcaaacgatacttgtgaagaccctcccaagatattgatttcattgttgcctgatacattcgatacaaagacggccattgccataggcaaagaattacagggtgtcagcgagcgcacggtaatgaactacctcaaggaactgtgtcgcagccggcttctgcggaaagccaaggctgggcattacgagaaaatcatatatgaatctggtaaatcatccacaaccgaatatgaatcatcaaccaaagactgcaatgaatgacactctgttgcagcttgcagtgtcttcagttttgcagtttggggtgttgaaaagcggaaaattcctgcaagactgcaaggactgcagactgcaaaacggtgttccgctttgcaggaattaaaaatacaaggccatgagcgaatacagattccatctccagaaatacaggccgggcagcaagacagcctgtcccctgtgtggcagaaaatcctgttttacccgatatgttgatgaggaagcgcaggtatcgtttcctgacagtgtgggcaaatgcgaccacatcaacagttgcggctaccactatacaccgaaggagtatttccgggacaatccgcttgtcaaagagactttaaccgtgcagcagaggattggtgatagtacggcgacaggagtcaggccaacagtaaaaccatcgcccaatccagcactgcaaatctcttatctgccctccgattgggtagatcagtccatgcagaggcttgacatcaaccctttataccgataccttgcaacagtggcaggcaaagagaaaacggatcggctgttcaatctctataaggtcggtacatccagaatgtggaacggagcgaccgtattctggcaaatagacatcaacagtaatgtccgtgcaggcaagattatgggctatgatgctaagaccgggcaccggatcaagcatccgttcaatcaggtaaactgggtacattcggtcaaaaagacaccggacttccatatgaagcaatgcctgttcggtgaacatctgctggcggatgcttcatcttcggcaaagactgtcgccattgtcgagagcgagaagacggcattagttgccgcccattttattccggacttcatctggcttgccacaggtggtatgcacggatgcttcaacagcgaagccatgcaggtgttgcagggacgtgaggtgattctatttcccgacctgaaggctacggaagaatggcggcgcaaagtcccgatgctgcaatccgtttgcagacgtgccacttgttccgatctgctggagaagatggcgaccgacgaccagcgtgaggcaggattggacatcgccgacttcctcctgatggaagatactccgcagatgattcttacaaggatgatagaacgtaaccctgcattgcagttgcttattgacgaatttgatctggcattggtcgagtaatccgaagccttgcttcgggagttcgtaagaaagtccataacacaataaggactttttgcctgacagcaacaaagtcccctctgcatccggcaaaatccgaatcggagtgagcaagctcaaacatcaatcatttatcaaaaaacattcattatgacaacagataggaaacaggccatgcacgttgaagccggcaaatcattcagcacagcagaagccaatgagaatgaacgtcgttggaatgaggacaagattgacaagaagaatcaggatccgaccaaccactatgacaagaccagaatgaaactgaatttcgagattggccctgacggaaaaatccatccgttgggctatcaggagaaaccgcttgaagttcgtctgcaggaacggctggatgcattggggtggaaacccttcaagccggacagcaagatccaaccgaattgttgtgctaagtttatcttcggtggcaaccatgacaggacgcttgcaatggcgttcggaaatcagaccgtcagtctggagaaagatgctgacaacagccacttgcaccgatgtgaagaagtcgaacattgggcaaaggatgtctatgactggtgtgtccgcagatacggacaggaaaacattgtcgggtttcaggtacaccttgacgagagcagtccacatattcatgctctgatcgttccggtcggagtccgtcccaaaagcggacgcgaatgtgtgatgtggtcggcaaagttcgggaaagaccggtttgaatacggccgaatattgaaagagatgcacacttctctatatgaagacgtaggcagcaaatacggccttgaacgtggcgacagtattgacggacgcaatgtacagcacctccacaagcgcgaatatatccgcaaattgaccaaagaggcaaagcaagcggagaaagcagtcaaagggcttcaatccatgatgcggcatctggaatcaaagattttcagttacagccgccagcttgaagatgcggaaaaggaactggcttccggcaggataaccctcgacaggtatgaggtgcagaaagcggatatacagaaactcattgccgagtatcagaccaagctcgaagacaaagccgacaaactcaacgaaaaggagcaggaattggaacggctgacaatggatgctacaaaggctcgttcagttgtccagcccttccgaaaccataaggttgacttcacaccgccgcgaattacagagaaagttcctttgttcggtacggacaagtgggtcgaacggcagaaccggcacatcgccaagcagtttaccgagattatccgcaagattgaatcactgtataggaatgatgcagcacggcaggttgaagctgcccagcacaatactttggcggattacggcgagttctaccggctgaaaagggaaaaccagtccctttcagagatcaaccaagaactggaatcagaactgaatacattgctcgaccaattgtctgtaccgtcaatccgcaatctgatttttaccgttgccgatgcactcgtcggtggccagcctgtacctatatcctctggtggcggaggaaattccgatttggatcttcgctgggatgggcgcagaccggacgaggaggaagaagcgtatcggaggaggtgtttgcttcatgcttcacgagtagctaaatctgtaaaaagcggatataggagaaggtaaccatcccttttagtgtgctgtagtaaggctacggcacactatattttaactacacatacgccccattatgagaatgtgccgtttgaggtgccgagttcatgggtgtggacaactgtgaatgacatatcaaaatcaattttatatggtgtaagtaaatctgcgaaatcagaaggtaaatacaaattattgcgcataactgatattcaaaataatcaagtagattggggaactgttccgtttacagattttgatgaggataaggtatcttcatacattttgcatgatggagatattgtatttgcacgaacaggagcaacagttggaaaatcatatttaattgatgggcttagacaaaaggctatttatgcgtcatatttgatacgagtacaaacatttgacttgattttaccggaatatgtaaaacgattttttgagtctggttattattgggagcaaattgaattaggctctgtaggcataggacaaccaaatgtaaacggaacgattcttggaaatttaaacattccattacctcctcctgtcgaacaacaacgtatcgtggcagaaataaaaaagtggtttgctttaatagaccaaatagagcatggcaaagatgatttgcaaagcatcataaagcaagcaaaaagcaatattcttgacctcgccattcatggtaaacttgtaccgcaagacccgaatgatgaaccggccagcgaactattgaaacgcataaatcccgacttcacaccttgtgataacgggcattatgagaacttgccggattcttggtgtcttacagatattaaaagtatatttacaatcaatcctaaaaataaagttctagatgatgtcattgcagggtttgtgcctatgactaacattgcagatggttattctaatgagttcagatttgaaccaagattatggggtgatataaagaaaggatttactcattttgcggaaggagatatagttgtggccaagatttcaccatgcttagaaaatcgaaaatctgcgattgttacttcacttcctaatggtataggagcaggtactacggaactttttgtattccgttcacaatgtgttttaccagaatacggtttatacttcttcaagtcagatttatttataagccattgtgttggtacctttaatggcgtagtcggtcagcaacgagtatcaaaatccattatagagtgcatcaaatttcctttgcctccattatccgaacaaaagcgaattgtagatgctgttcatacagcaattgccaagttggatacaataatggagagtttataagctctccattattatatcaagatgtctgaaagcaatattcattgcattgacaattcgcagttgctcatgatatgatggtatcggtacttctatagctctgaataattttttgttcaagtgaggaatagcggaacccaccttattttcacgcaatgtctttcggtgcaaattgatgacttgtagaatataatcagtattcatatggctgtttatagtcaacagtttgaatgtactgccttgatagccttcaattggcgttcggaacacttctccggagttttcgccatctaccagtattaaaagagaattagccggaatgaacttccctgcagtcaacgtctttgcatcgcgttctccacgcaaatatttgacatcaagatttattctctctataccattctgtttttcaccatcgttcaaagaacatagtgcttgcatgggcacaacacaccaagaatccggcaagttctcataatgcccgatacgttctactatattgttgtcatattcattataaatcaatgtaatatgacaacgaaattcagaaactatcttgccaagacaaacttggcaaagaacaccgtaacatcgtatgtatggacggtgcagtatttcctcaaccactatggggaagtgaacaaaaagaacctgttagcctacaaggggtatttggttgagaacttcaaacctcagacagtaaatcttcgattgcaaggtatcaacaagtaccttgaatttacgaaacaagagaaacttaaggtaaaattcgtcaaggtacagcagaaaaactttttggagaatgtaatcagcgatgccgactacaagtttctcaaaacgcgcctgaaagcggacggttatgatgagtggtattttgtcgtatggtttatggcggctaccggtgcgcgtgttagtgaactgctccacatcaaagcagaacatgtacaaatcggacatcttgatctttacagcaaaggtgggaaaatacgccgtctgtatattccgaaaaatttacgcatggaagccacgaaatggctcaaagaaaaaggtcttgcgtcaggctacatatttctgaacagattcggagaccgaattacaacacgcggcatagcccaacagctgaaacactttgcggaaaaatacggaatgaataaggaggttgtttaccctcattcattccgtcatcgttttgccaagaatttccttgaccgattcaatgaccttgccctacttgctgaccttatgggacatgagagcattgaaaccactcgtatctatctccggaggacagccagtgaacaacaaaaaattgtggacaaggtggtgaactggtaattccacatcagcccttaggagtgtattcaattacacttctaaggctgtttgaatatcatcaagggatgagaatagttcttctaccttttgaactatacgttgttgctctgcaagagggggcaaaggaacatttattttatgcaaagcgttggaagataaccctaacaagcctattccttttcctcctataagattgttttctttcaaatacactaaaacgtaataataaaatgctacacacaaatctcctttcgctcgaagtctatgaatatggttctgaatacaaatgtcataatcatagttccaaatagccgatcgcccaatatcaccaccttcacatactagtaaatccccttttgttacagtacacttatccaattcagattctttgtatggcatttgtttaatcaaagtaaaatcaaattcattccaatatacgttagatgttgttagatagcttctcattattccttccttgtttgaggaattaagagctttacctgtattgtgattaaaaatatctcctaaaatagtgcattgccatcctttgggataatgcccgttatcacaagtgatttcaactttcggattgatacgtttgagtagttcgatagccggttcatcgttcggatcttgtgatacgagtttgccgtgaatggcgaggtcaaggattttgcttttggtttgtttgatggtagcctgcaaatcgcctttaccattttcaatgatgtcaatcagagcaaaccacctttctatttcagccacgatgcgttgttgctcggtaagaggaggtaaaggtatcattcctttgcatgcatcatttgtacttaatctcggcatttttacgccataaccacattgctgtgtataatcaagaaaatatgcagagcgcagtacatggcacaagtaatgtgttgaaatgccataatatgaattgaacggaataatttcagttgtgcaatacccagcttgaggagcaaccaataccttattcaaatatgtacgcaatttggaatatagtacatcgccttttttgaatttatgacgtacacctttgatgcttctttcttttttcgataatatctgaataatggaagctgtatctttttccaaatcttcaagttctagtatccattcatcatcagcaatatctgtgacagaaacattattactgtcgccataattacttatttcccctaaagttgcccacacccatgaactcggcacctcaaacggcacattctcataatggggcgtatcggaagtctttgcagcctttttgcttcgcttgatttttccttctttaatcaactgctctttctccgccttgatgcgttcgagcaatacggatgcaggttcatccgtagggtcttgtggaacgagtttgccacgaatggcaagatcgagtatcttttgacgtaatttctttgtatccatataggctattctttgtttaagaacaagttgcaaaactcattcagttgctgctgcatacgttcctgcggaataagaatgcgtttatattcggctatcattgtcgggctcatacttcggctcatagcatattccaccacaacccggtctacttccgggcagagaataatgccgatagaagggttctcgttggagcgtttcacatctctatcgagtgcttccagataaaactccaactgaccgaggtctcgcggatggaattttgtctttttcaattccactgccaccaatgcctgtaatccgcgatggaagaacaacaagtcggccttgaaggtagacgaaccaatattgaggcggtactcttgatccatgaagatgaaatccttgccaagttcgagaataaactgcttcatgtgttctatcaaaccgtttttcaattttgactcgctatgctttttcggaagattcagaaaatcgacaaacagcgtatccttgaacattatcggggcattcggataagcattgagtaatcctttcgacatattgttcttgttgcccaataaagccgtatatgtctgattggagatgcaacgttgaagttcccgtttcactaaatgttctttattggcatagagtatataaaacatccgctcttcattgcttttgcatcggcataatatctcaatatgattggttaaggtagtcagttctaaaatcttaggcatttgtccggtttttggctggatgaattgtgcaaccggaaactgcacaattacagctacctcctgtgtaggttgggctgattcaatttgtgcagttcttggctgcacaaattcagagttcaaatacttttctacaatcgtacagaatgtttccgatgaatattcatcatagaacatcaccatattatagatacttcttcggctatagcctttaatgtcaggtcttcgagaacggatatattcggacaactgcgttacaaccttgcttccccattcctcgcttttcagtttggctgatacatatcttccgacatgccacgctgtgaacaacagttcgttatttacggctcttgaagcacggcttttatgttggagaataatatctatgacctctccaaactgctgctccattgatatggctatattatcgttttccatacactcaatcttcatttatatttgcgagcaatttttcaagttcagccacagcagaacttatcgtccggcttttatcttttatatcagccatcagttcagccaatgagcgatcatcggcttcgccgccttgctttatccaagtgatgtcaaggctcgtcttgtcacgagtaaggaggtcttctaccggatatttacgccaccgcccctgtggattgttcgctgcatcgaaagtttctacacggttgttatagcaggaaacgaaatcatccaaatgatgacgttcaagtttgttggtagcaagcgtatgctttacatctgtacgatagtcgtagaaccatacctcttttgtggactgaccttttgtaaaaaacaatacattggcctttacgccttgggcgtagaatataccggtaggcaaacgtagaattgtgtgtagattgaaatctgtgagtaacttctttcgtatcgtttcaccggcaccgccttcaaaaagtacattgtccggcaataccacagcagcacgacctccggttttaagcatcaacatcatgtgctggaggaagttcaactggttattctttgtctctacatagaaatcctgacggttaatatctacagagcctgccggacgtgttccgaaaggaggatttgcaagtattacatccacgagcgtagatggctctttctccaatgaatcctcgcaaacaatcgggctgcggtctgttcctacaccatgcaaatagagattcatggaggcaagtgttaccaccaacggcgtattatctactccgtgcaaggcattgttacgcaagaaatcacgtttctccttgcttgcagactgaactttcatataatcgtatgccgttagcaggaacccgcctgttccacaagccgggtcgcaaacagtttcacctatttgtggagcaatacaatctaccatcgcctgaatgagcggacggggagtaaaatactgtcctgcaccacttttcttatcttgtccgttcttttcgagaatgctttcgtagatggcacctttcacatcaccgtccatgataagccattgttcttcatcaatcatggtaatgacttttttcagatagacgggcttatcaatcttgttttgtgccttggtgtaaatcgtgccaatcaagttctcttgttcgctcagctgtttcagtgtctcttcatactgcctgaccaaatccaaaccgtcaagagaaatcaaatccgcccactggtagccgaccggaattgccgattcttctccaaacatttccacattttcggcatccatcttcaaaaagagaagataggtgagctgggtgatatagtcggtaaacccgataccttgtccggcaagtgtggttgccagattccagaccttcttggtaagcgattgctctgttatattatttgttgccatattattgttcttatgctgcttttcttaaaactacgaatgtataaagagaacgaagtgcatcatctgctttctgtatattgccgaatgcacgaatcatttgtgctgcatgggtagcatcgtcctcacgaatatccctgacggtacaagcaccgttggcggcgatataatccactatacggctgataatttcacgctgcttgtcggttatttcgcgttggttttgccctaaccacaggttgaaatactgttttgatgtgtagactatactatccaatcgctctatttgacggaaagcaaagcgcacaagctgtatgatgttcgtcagggcttcgctttcctctttggtcgtagaacgtcgtacactattaggatttacaatggcatacgagttccagagttgtttggatgtaaaatggttgtttgccattttgagtttgttctccaaatccttcagcatcaaataggttataggctcaccctcagtgttgtaaatgatgcgtaaagcctctatctcatcgctgtgctttttgcagaaatcctcgaaagcatctgtcgtgctttttgcttcctcaatggaaaatcccttatagataagtgtgtcttctcccggcatcaaagtgttgacaaaccctgcggcaaggatgagcaagtacctccgtgcatctgcatggtgagcaagcggagaaaccaatcctttacgttcattgttaggctcattcacacagataaacggagggagagtgttattttcaagcgcattataaattctggaagcaagttccttcatgtcgtcatgagccaagcgggtgaactctgttcgctgcgagctgtcagccttgttgtatattcgggaaagcgttgctgcaatacgtttcaaatactcatcagggagatagccatgactgatacgctccaacagttcttttagggtgattgtctttgtcgttgagtcatcagtcgctgttggaattgtcttttcatgttctgtcacacccactgcatctaccagatagaaacagtctttgctatatgcgtttggggtaacattgcgcagttgttcatctccgattatacgcacaccgcgccctttcatctgtatgtaaaggggcaatgattctacatcacgcataaatatcactacttccaatggcttcacatccgtaccggttgcaaccaatgtgcaggtcactgcaatacggaaatccttgtcgttgcggaattgacgaatcagttcgttgctgtcgcctgccgaataggtaattttctgaacaaaacggtcatctgtgcgcccgaacacttctttggctatctgtacgatattggttgcatgagtttcgtttagagcaaatatcaatgttttgggcaggtagtctatgttcttgtctcgctgcggatcattgaacaactctgtgtagactacatcgcgataagtggataagataagtttgatttgcgccggattgataatgcttcgattcagttctttattggtatagtttttcgtctctttgttgcagacggtcttcacttctccagtatagcaggtttcttccttaaccttttctccttccaagatggctcctccgctctcggtaacttgtgtcttgattctgtatacacggcaatccacatttactccgtcgactatactttgttccaatgtatagttgacaacgcggttgttattaaaaaatgccattgtttccggaataggcgttgcggtcaatcctacaagctttgccgtatcgaagtattccaataccttcttccagtttccataaatggaacgatggcactcgtctatgataatcatgtcaaaataatcatgcggcaaattgggatttggcggtaaagtgacctcttccgtcggttcattgtcgtcatcgtaatcattatcttcgatggcttctcctttcagaaaagagaaaagacgctgtatcgtcgaaataatcacattactgtcagaaggtatagacgcagagcgaagtcggtttactgtaaatatagtattgaacgcatctccgttttctgtcaatcggaaagttccgaattctccctccgcttgtttgccaagattattcctgtctacaaggaacagaattcttcgcatcggggtatatgacagcatacgatatgcagcaagacaggctgtatatgtcttacctgcccctgtagccagtaccatcagagcgcgattttgcccactacgaaagctcttttccaactcggttacagcctcgtactggcaatcgcgtaatcctttcttgcgtaaagtaggaagcccggcaaaataatcatttatccctaactgcttgactaattcataaggagtgggaagagtagttatctgtttgaaagaagaattctgtttgcggaaatcgcagaaatatagttctttcccgtttgaagtaaagatgaaaggtagcggcttctgatacgcctgatagattttaggaacacttctggcgtataaggcagcctgttcacttactttattggaaaaggcatccacatcctcccttttagcttcaagcacaccaactgcctttccattcagaaaaaggaaataatcggcttcgagattacctttcagcagcccttcccgtatggcaacggcagagcaagttggttcgtagtcttctctattaaccactttccaaccggcatcggtaaaccactgatctattttttgcctcgctttttcttcaggtgtcataagttcctatatctctaaattatcggaagttgcattctaaaaataatggatatccccaaacgctattgacgttcgtccttgtccgttatcagatctttcagatccacttgaagtatctctgcaatctgctgcaacgtctccagattcggctggattctattacacgcataggcattaaccatactgaaactcttgtcaagttgcttggccaaccaagtttgagagatacctttatccgacaaaacagcctttatcctattcaacttcatttttagacgcaattttattgtgcaaatatagtgaattatattcgatagtcggatttctttttgtacttttgtcgaataaattaaaaatagctatgattctaacagaaaaccaactaaaagatcttactcttgctgctgatgctatttcggaaactcatcagcaaactagacatttttctgctggtcaacgtgcatccgtattcctctctcataaacatgacgaaattagccaactcaaacgagttgcctacattttagaaaatttacatactagcatttatgttgattggcttgataattctatgcccaaaactacttctggagttacagcgacaaaaattaaacagcaaattaaaaaatatgataaattcatattgattgctactgatggtgctattgactcaaaatggtgtaattgggaattaggttacggcgatgcacaaaaatttgacttagggaaaatagcattatttccaattgctcagaatgatggtagctggaaaggttctgaatatatgcagatatatccgaatattcaatattattttggaacagaaaaatattcaaacggggaatggatacctagaggatactactatcgttacaagtataaagatggaaaattttatctcaaaaaattatacgattggattatatcatagttacttataaaggacaacaattttcatggcatataaataccaacttatctttctgggagatattaaaaataacgcttgtaatacaattaaagttcgcttttttgagaagattctgagtatagggttgaatagcaatatgtttgagctagtctatgtcgatactttcttcgaaaaatattcaaataaacagccaactttcgcattctattttggtgacataaatcattcggaaaaagatatcgatgctttaaaagttctccttgataatggagatgctattttgccaatatattttggggaaaattttgaagcagaagttcctgaaatcattcatgtaatgaatggaaaacaatatgttgctgatcatattgaaaagtatattaactatgcatttgaatcaatgaggttattgagagaaaaccggaagctattcattagttatcgccggacggactcttctgctgtggccaaccaattatttgatgcttttgtccggaataattacgatgtatttcttgacacatattctatcaatccagctaaaaattttcaagaagaattacatcaccggatgacggattgcgatgtactaattcagctatacaccaatgattttaaaaatagcaagtggtgcaatgaggagattgtatcagcgaaccaaaaacaaattggagtggttgaaattatctggcctgattgtaccccagacatacacaatttattatgcgaacctatccaattaacacaaaaaatgtttgtgaatgaagattttcataatgaatcttgtcgtattaccgaagaatgcattgagaacatcgtacatacggtagagtctattagagctaggaacctcgcagcaagacaagacaaccttgtgggagaatttgttgaagaagcccgtaaacaagggcgacaacttatacaagagtatcgctatcttgtggaaactttgaaagacaatagaattagattgtttattccggcaataggaattccacaatcttatgactgcttcgattcgctacgttttagaaaattgcttgataacgaaaaacttgaattattcctcatatatgatgacttgcgcattcgcaaaaaatggatagaacatctggaatggttaaatgaatcattagaggttaagactattaaaaaaagagattttgaattatggctcaaaagcaattgaatatattcttgtctgcaagtattcctatgttaggaagagatgaaaaatattttaaaaccgcagatacaatcgcaatacgtgattccgtattagctttagctagcgtggcattgcctaagtataaactgatttggggaggccatccttcaataacaccgcttatagctagcattttgcagcattcgggattagacatacagagcagcgtaactttgtatcaatctacgtattttgaacagttctttcctttagaaaacgaaagtgttgctcatattataaagaccgacgatatgggaaataaagatttgagtataaaagtgatgagaaaacatatgcttggtgataatgaattttacgctggaatatttattggaggtatggaaggtgtagaagatgaatatacaatgtttacccagttgcatccaaaagcaaaagtatttcctttggctagcactggaggtgctgccaaaatcatttatgacaaatattttgatggcaaagaacctgaattatgtattaacttggcatattcttcattgtttaaagacttacttaatttataaataataaatagttatgggacataagatttttatatcatataaatatggtgatacttctgtgaaacatcttgaaagaacaccttggtacgaatcaactaaagttcgtcactatgttgatgaactacaggataaacttgaagatgatgatcacattacattggtcttggcatcgtgcagcggagcggcaactcctgttacgctgcatcatatcttcgtccaactccgtaaaatgtcgccaaaagaacggcagagcattacccgaccgctcctccactgcgttgcggccggcatcacggatcggccgtgcgtcaaaaagacgggacgactccgatggaggcgccccgcaaattttacagcagtatgctgctacgttcgaatacactatctgtactcgaacggtatagtagacgacttaacgggaacgtcgatagcattggttacggcgtaacccttatcgacaagctccgttacgaagaatatcacatgacaattcttcacgacccaactttcatccaaggtcatcgtaaagagatgctcaccggtaccgccggcagccagcgcaccgacctcatggccggaataatccgaaccagagtaacggctgttcacgtggcggataacattattatgcgtgttgaaatcgtaatcccccttcataccattgttcagttgagtacctgtcagaccatcttccagcacccaagcgcctacgcggaacgaaccggagcgagctgctttcaccgtaacacgagcgaccaatttgtttccagcaacttccataccgaccgaaatacctgccccagcatccgcagaaagcgatttgtcgatcgcctgcttgatattggatacgttgttgttgtaaccattattccctacccctgtctggaaatcgaaatttacataaggatacgtgctgacacccatagcgtaatccaaaggcacatcgggctgataaggatcacccccataggtgtgacaggctgccagtacggacttgtccgcatattcggccgacttgcgtacatcttccatcgcagcgatcataaaaggacagtagccgcaactcaagcccgtgaactgcgtgatgagcgtccggcggacgaacgaggtgttgtccggctggggatcttccggagcgtcaggcaccgagaactctacagcagaaatggttgtcggacgatctttggtattgtgggtcttataagcaacccagaacgaaaattcacccggctcggtaacagtgtacacaagcgtgttgtcctcgatggtgaatttcgaaaggtcgagcacgtcgttgctcttggcatcgtagaaagcgactgcgtcgagcgacaatttcactttgtcataatagacattaatgcgggcggcatcctgcccgtcggcattgattaccgtcgtcgatgccgtcacctgcagaccgttttcgatgttttcattcgtacccccattgccgttttgaccgttaccgggggtcaccggatccagccccgaacatcccgcgctcaacatagccatacaaagcgcagggataatgaatttcttgaatttcataatctgttttttaattaaaaggatgaagtgatcacaaggttcagacccgtgtaagccggcatataacgacacgcccctcccgaacaaacatagcctgcacgattgcggccgtagctgagttgaatacgcgtacgatttttcaggtaactgaatcctgcactgtaataattcgttttagtaaaggagttagcctcggtctcgtcgaggttatacatatcgctcacaaagaaactccaatgcggcaccatgttgaactccaccaaagccgcgacccagtcaccctcgtagtcggtcgaataaaggtattgcgcctcgacgcgcaacgactttttcgagtcgaatttgtaggtgacatcgcctatgaaaatgttggatacgtaggtctgacgctggaaaccatgactcgggttgcgcttctggatcgaaacaagcagcgaggttttgagtttcttgttccactggcgctctacatcgatgttaatatcacgccacatcaactcccgctcgcccgattcgctctgctccgaacgcagcgtatagaaagtggataagttggcgtggaaattccagtagcgatgacggttcgacttgctgcgatacgtatagtagagatccacctgaccgcctatttcgccgtcggtattaacgatatacggttccaaattggccaacaggtaagtgtactggcgcgtcagagagggcaggtagttgagtacattgcccgtaccagagccgtaaagcgaaagcatcgtccccatacggtctaaccgacggaaactacccgagatgctgaaaggtccgtagttataaccggcctcgaccaagatggcgttgccggctgcggctacgtccgcaacagtcgagtagatgtccttccccttatatacgtattcgcctttgagcgaaagccccttccagtcgaaattcaggcggcccgaatacatgttcagattgggcgaggtaagtccgcgagaggcgaagtcgatcgtctgatccttgtcgagcgactcgtaacggttgacgtagctgccctcagccgagaactgcgcagcgttccaaccgaaaatatcattcaatgaaatgtgcagatcggcaccgcgcacccacgaatccgcatagtcggtgtagagccggggacgaccgtacatacctttcacctcgacgtagtcgccgaagcggtagataccctgcacaccctcgatcgaattgttgaatcccagctgacggtcttcgaacgaacgaaaaataagtccgctgccgaactggtcgaaaatatcacccacccgcacggaatagttgtgatcctgccactggatatacttcgaggagagatagaagtgataggctccgggctgctgaccgatctcatatccctgcaatgcagggagataagcgtcaatctggagtcccgcagaaaaacgaccgttcatgtagtcgagtttcatgtagttgttcgaaccgaaacgatcgtcgggagcagtgcctgctgcacccaatcccgagtcgtcctggtagtagatcgagttgctctcgaaactaccggagagctggccctcccccacgcgaacctgcgccgaaacggcaagcgtcgccaagagtgcaagcgccaagccaaacagttttttcaacatatcggaatcttttttcgatttaaagagtaactctcttctgcttccataaaatacgcctccgcacctccagcggatttgcgcatccggttattttataaaagcataaagcagggggaaaattcccattccgggtacctccccctgccttatttcaaaagagtctgttagcgacggatatatttacctgccgcccgctgcttccaacgctcgcggagcgacttctcggcaagaggagtaaccttaagcggctcgtagctcttcgcatcagatacgctcgtgcggctcaacgggcggacagcacgctcggcacccagcacatcgttcgtcgtcacggacttgccgcccttgacaaccgacttcacggactcaccattccaacccttggtcagcgtcagtgcgccgcatacccgggtgtcggtcgaatactgtcctccgtacattatcttcgctgcattcgggtagtaagcatcaccttcgtactcatatccccctacagtgatcgtagagttatcgctgctaatcgttacggggaactcaccctgcgtaatcgccattttgctgataccaatgaaatagtactcggcccccttgttccataacgtaagcggcggcaggttggttacgtcgaacggagcgactacggaaccgtcggatttcatctcgagataccacttcggaccgaaatcgaagaacatagactccgtatcgtagccgttgtactcttccgtagttgcgatgaaaaggtcgtatggcgtcttccagccggccaggtagttggtaccgtactcgtacttcggacggtcgatatcgagtcccaggcaaagcaggcggttctggccgcgcagacgctcattgtagagcttaagctgcttcttgaagccctcgtacaacttctctacctgctctttcgagtagtttgtgttatccagatagtagtcaatgacctcctgggacagactctccggacacgtcagtccagaaacgatctccaccttgcaggtcatcggcgcctcgccgccctcgtattcagccgacagcgtccactcacccagcagactttcgaaatacttcgaatctaccggctctttatcaggtacaggcatagaacgcttcttgccgatggcagaaccatcttcgtcgggatcgttgccggtaccctcgtcattgtaagcgattacacccaggtaggtgttggcgtcgggacgggtcgagaacattacgttgtaaccctcggccgagttgatcttctcgatctcatccggagtaaacgcgttaccgttttcgatcaggtcggtgttagtcctgccggcgttgagttcgacctcccactcacgctcgtagttggcagcgtacttggcagtcaccgcgtcacccgtagtacatttgatattgaaccaaacttcgtagggcgactcctcatgaccttccggagcatcgataccggtaacggttacctcgggagccggtttcgtaggttcgggcagcgtaaagccttcgagtttggcgaaagcctgcttcgaaccggtattatcgttgatacccaccgcatagacgtaatacttcgtacccggcgtgaacttaatgaaatactccgtcaggtcgaaagagaagtcggtctgccctttggctatctcataagtctggacattgaggatgtaaggtgcgttgtaagaggtcagcgcccactgcatattcgacaggtcgcctttcagcattgacgtcttaatcacctccatatcatactcctcgaaaataccaagacacaggtaggataccccctcgcacaactcgaaagtgagcagaccgccgttgggtctcaatttatcggtattgatcttgatctcaccgagtttttcgggcttcttgttggtaacctctatcttctggtagtagccggtccagaaatcgccctgctctacatcgtcggcacgggaaccggcttctcccaagataccaccgccgacagcttcgtagtatgcgtcctgatcccaaaggggcgaatagtatccctgaccgaagccccaagggtgctcgccgaatgcgaactcgccgagcagcacataattgagctgtccaggcaccatcgggttccagagcgttatcatcgagccttcctcatcggtcacaggctcgccattctcgtcgcgtaaaatcgaattctcctcgttgaatacaaaaacagtatcctcggtaatatagttgtgatatatatcgtcgaagagattcatcatgtcggcgtgggtatagttcatcatactctgataattatgcgtcaacatgtctatcagcagatatttgatcacattcttgggatcggtcggctggaatttcacgttcatgctaaaactcatgtagtccacgtcaaacacgtcgtacgcgttatcgccgaacgaagcggtcttggcctcaacctcgagaaccttctcaaagaactcttcgttcgcagtggtggcagccacatagatcacatactccgtatcggggtccagtttacttacggtcagcgaagaaacgccgtccgcaatcgcagatttgacgccggtcgcaaagacgatcgttgccgtcggtgtttccttggcatcggccttgggcgtcgccaggtaagcaatttctgtcaaattagcggcagtcacctccaatttgactgtcgaatactgtgcttcaaggaacttcacttccaatgaaggccaagtaccggggtctggttctgtcttgtcgtcggtacaccccgtcaatcctactcctgcaagcagcatgcatacaagagaaaataaattaacaaataaatgtttcataaaaaaaatttttaataaggcaattaagggtttcttcgtttacaatattatcatatcaccattcgtctgcggttaaagcaaaccatctgcatggccttttcgcaaaatacgggtgtaaatataaaaattattttataaaaaaacaaaaacagaaaatttcaccagctatctatttccgcaataaatgatccacgacgagattcctgctttcggcgaaacgccggatctcatcctgctggttggcaagatgctgttttcccatgctgacacgtaaataacctattatcataatacaaatgattttaaccgaggcaacgtcgcctcggtcggtaaaggtaagcgtatgcttcgggagcaccggaatacaaaaccttccggcataaacagtccggaccagccgcaaagcccggaaaatagatggaattatcatattcgttcgcaccgaatgatccccacagcggttttctacctccgaatttggatttttgccggattttgcttaatttggtgatattgatcctctcggacaaaggctaccttccatgacgaaacacacgataatatttatgacattattcatttgttcgagttgtcgtagcttgcagggcacggtattttgcatcgatcggcaatcggacaatctcaacaatcggttaaaattatcggactacaccctggaccgagcaggcaattccatgattacggatcgggatacgatctatcggttagcgctgcttttaggtaacgatacgacgggatacggaaattggaaacaatattatcgaattcctttcgacgggaatcgtaccatgagattggtcctcgacggaggcgacgatccggggccgcgagaatatttaatattgcacgacgaacacggtaaaattgttcgctatatcgaaattgcggcggaatatggagatggtccccgctcaaaaaaaatatatagcgtgctgactaaagacagcctgtatgtttacacggttactacggaagcatttttgaccggcgacgattttatagacgatacgaaacctgcaacagcggatacgatgaaaaaaagctaccatatcggcgacttgacagcgatttacaggtaaaacttagttaaagattgttcgggcaaagctcaaaatttctcagcagctcaaaataattccgacattttacggcatcggatttggcattatcggaaatattgcgtaatttgggttgcaattcgatactctttgatggcaaaagcgactgtacgaattttcaaaaatcacggattcaaacaaatcaaccggaatatcgaagaactgaaatttaccctattaaattataacacggtcagtttcctacgtaaaatccggcaggaaaaaccgcagcggcagcgaatatgaaacgaataagttttctggcgatattcttcgtcatcgcttctctcggtgccatccacgcccaacaacgcacgggtttcgcctattacgacctcgaccgcctctacgacacgatcccgtcgctcttctacgacgacacggactacacacccgaaggacggctgcgctggagcggcgagcgttaccgcgccaaagtcgaacgggcgggcgctgtaatcggccggatggcgatgccgctcgcaggagtgtatggagtcgaaaacgaggaggttgtcaaagacttggtccgggcgtcggacctgccgtacagttatgtgcaccgcaccctcaatacgctggacgggatggatttcgccttgctctactatgccgaccggttcttcacggaacgtatcgaaacaggttatggctacctctgcgtcgagggtatgctggacggcaagccgacagccgtattgctgacacgcggcgaccgatatgccgctgaactgctggaggagctgcgcgaacgaacacccggcatccggatcctctgtgcaggcaagctcccgtccggaactgcggaaaagctctcgctcagagacgcattggctccggccgagcgccgagggcggggcaatgcctacgcacggggcggctggtggctgcacgaccgaatcctgacagacacggcgctgaccgtcatccgggccgatgttttcgcccggcgcgacctgctcgatccccgcagcggaacgcccctgccgacctatcggcgacaacgctatacgggtggcatcggccgatattttccaatatttttatatattaaataagttttttgattatccgaaaaatcatcgtatctttgcccctccggaaaagacggttttttcaccgttgccttcccaatggaaggcctcgcccgcagcccggcggaaacaactctgaaacagcacatttattgggaaaaacactattataatcaacaacgacaagttatggcagacgttaaacgagtctataccttcggcaacaaggaagcggaaggtaacggcaaaatgagggaactgctcggcggtaagggtgcgaacctggccgaaatgaacctgatcggtattccggttcccccgggattcaccatcaccaccgaagtatgcagcgaatactacgcacaaggacgcgagaaagtcgtggggctgcttcgccccgaagtggagaaggcgatgaagaacatcgaaaaactgaccggcatgaagttcggcgacaaagagatgccgctgctggtatcggtccgttcgggtgcacgcgcttcgatgccgggcatgatggacaccatcctcaacctgggtatgaacgaccaggccgtggaagccgtagccaagcgcacgggcaatccccgtttcgcatgggactcgtaccgccgtttcgtacagatgtacggcgacgtggtgctgggcatgaagcccgcttcgaaagaggagcacgatccgttcgaggagttgatcgatgcgcagaaagagaagcgcggcgtgaaaaacgacaccgacctgacgaccgacgacctgaaggagctggtgcacaacttcaaggcagctgtaaagaaacagaccggcgaggatttcccggcaaatccctgggatcagctctggggcgctatctgcgccgtattcggttcgtggatgaacgagcgtgccatcctttaccgcaagctcaacaacattccggcggaatggggcacggccgtatcggtacaggcgatggtattcggcaacatgggcgacaactcggcgaccggcgtagccttctcgcgcgacgcagcaacgggtgaaaacctcttcaacggcgaatacctgatcaacgcacagggcgaagacgtggtagcgggcatccgcactccccagcagatcaccatcgagggttcgcgccgctgggccaaggcacagaacgtatcggaagccgagcgtcgcagcaaatacccctcgctcgaggaggtgatgccggccgtatataaagaactcaacgagatacagcaccacctggagcagtatttcaaggatatgcaggacatcgaattcacgatccaggacggcaaactctggatgctccagtgtcgcaacggcaagcgtacgggcgccgcgatggtgaagatcgccatggacatgctgcgcgaaggcctgatcgacgaaaagaccgccgtactgcgctgtgagccggccaaactcgacgagctgctccaccccgttttcgacaagacggcgatgaaaaacgccaaagtcatcgtaaagggactgcccgcatcgccgggcgcagcgaccggtccggtggtgttcttcgccgaagatgccgaaaaaatgctcaaggagaaaaaccaacgtgcgattctggtccgcatcgaaacttcgcccgaagacctgaagggcatgctcgacgccgccggcatcctgaccgcacgcggcggcatgacctcccacgccgcggtcgtagcgcgcggcatgggcaagtgctgcgtatcgggtgcaggcgagctgcagatcgactacaaggcacgtacgatccgcgtaaacggatatgaaatcaaggagggcgactggatttcgctcaacggttcgacaggcgaggtgtacctggggcaggtagcgacacaggccgccgatttgagcggcgacttcggacagctcatggagctggcccgcaagtactcggtgctgaaagtacgcgccaacgccgacacgccgaaagatgcggcgcaggcctttatgttcggcgccgaaggtatcggtctctgccgcacggaacacatgttcttcgaaggcgaccgcatcaaggccgtacgcgagatgattctcgccgacgacgaagccggccgccgcgtagcactcgccaagttgctgccgatgcagcgcagcgacttcgaggggctgttcaaggcgatgcagggccatcccgtgacggtccgcctgctcgatccccccttgcatgaattcgtcccccacttcgagaaggaacagcgcgaactggccaaggacatgaacgttccctacgaaaagatcgcggccaaagtggagttgctggcagaagtcaatccgatgctgggccatcgcggctgccgcctgggcaacacctatcccgaaattaccgagatgcagacccgggccatcatcgaggcggctatgaacgtaaagaaaacgggcattcccgtacacgtggagatcatggtgccgctggtgggcaaccacaaggagctgcgttaccagaagaacatcatcgaccagacggccgagaaggtcttctccgaacgtaacgaccgcctggaatacatggtcggcacgatgatcgaagttccgcgtgcggcagtcaccgcccaccagatcgccgaagtcgccgaattcttctcgttcggcaccaacgacctgacgcagatgacgctcggcttctcgcgcgacgacatcgccaagttcctgccgatctacctggagaaaggcattctgaagaacgacccgttccagatcctcgaccgcaacggcgtgggacagttgatccgcgaggcggtattcaaaggccgcggcacacgcgaaaacctcaaatgcggcatctgcggcgaacacggaggcgaaccttcgtcggtggagttctgccacttcgcaggtctgaactacgtgagctgctctccgttccgcgtgcccatcgcacgcctggcggcagcgcatgcggctctcaaagaggcataaaacgatatacatgcgacgaaatcctcccgaaccgatcggttcgggaggatttttataaccacgaccggcaactcctattcagcgaattgctgcgccaccgccgcatcgtagtcggcattggtaaaagtataggtccaacgggttctgaccgcgtgagatgccgttacctcctcctcataattccaatcaatggtagggtcctgcctcgaataataatcggaatcgcgcggcggctgataccccttgatataaatcgctttagtcccatcctcaaagacaacttccacataccggatatagctcgacggaggtggacagtatgctattgccccatccaccctttcgctctcaaaagtacaacggctatctataaaaagcaaatcgaagtataataactgatattcagattgttattcatcatgtcggtattgaaatatcgagagaatgtgaatctttctgcataaataaccgagagttgcgtttccaaatcattaccttgttttgggatgcctgcggttacatacaacggttatttacagtctattacgcttatattcatcttgtcggacgactctgccgaaattatttttgtccaccttaaaaaagcagagtttatgcgcagtactttcaaggtcttgttctacctcaaacgaacaaagaacacctcgcgtgcagtctatccggttatgggccgcatcacgatcaacggcacgatttcacagttcagcgccaagatcaacgttccggaacaactgtgggaggttaaaggcggccgagccaaaggcaaaagcgtcgagtcggaacgcatcaaccgccatctggacaatatccgcatccagatcggcaaacactatcagtcgatttgcgatcacgatgcctacgtcacggctgaaaaggtcaagaatgcctggctgggtatgggcgaacgataccggactcttgtgaatgttttcgaacattacacgaatgatcttttcaaacgtatcggcgtagatcgctcagaaagtacctggtggcgctatcgggcgtcgctcgggcatctccgggcctttctgaaacacgagtacaacctccacgatattccgctgctcgaattggaacagtcgttcatcgagcaataccacgtctatttgaaaactgtctgccatttgaaggcgggcagcgcatgccgctacatagattgtttgaataacgtggtgaaaatttcgttcaacaacggtcttatgccgcgtaatccgttcgctttctacagttattccgctccgaaggaaccgagaacttttctcagcgagaaggagctacggctttttcagacgacacgattgaagagtgccaaacacgaataccaccgcgacctgtttcttttttcctgttttacgggaatctgctacaaagacatgcgctatctgacctgtgaacaaatcataccggactcggaggggcacctgtggatacacggtaaccgctgcaagacgggtggagaatatatggtcaaatttctccctgcggctttgcgtcttctggaaaaatatcgcggaacagctccgtcaccgcttgcattcgacatgccgaaacttagcagtatcaattgctccttgcgtcgtattaccaaacagtgcggtatctcacggcacataacctttcactgcgcacgtcatacgtttgccacgacactctgcctttcacagggtattcctttgtcaacagtttccaagatgctgggacataaacagatcaccacgacacagatctatgcgcagactacaccgataatgatcgaggatgcgatcgatcgtgtcgaatcccggctgggcggtaaattcgcagtatagcgtaatcatggattaaatcatccactgcaaggaaatttcatgtaagtaacagtgtaagttacaaagaatatcggtcgggagttgtcacctttgcaccgtaaccaactatctcgattatggataaagacgacaaactccgccttgcggaaattcatgcaatggtcaagacgctttccgtggaccttcaatttttgagacgccatcgcaacgtgcttttcgggacaccggttctggagttcaacgaggtttgctcggtgcttcacctgagtgcccgtcaggtgcagcgccttcgtgagcgcaaagaactcgtcgggttcaacgtggggcgccggcgcttgtactttcagacggagatctatgactacctctcccgtttggagagagaaaacctcaaacatcccgaacagtcaatggaacagtgattatggatcgaccgaacaatcccagtgaaacgaagtatctgctgatcggggaagaggagttcgaacgtcttctgcgcagctattatattctcggcaaggggcttctggctttcgaatatctctgcggtcacagcgaccgtccgatgtacctgtcagccgagggcgtgtgcgaagtgctcggcattacgcgcgacgagttggacgagcaccgcctgaaacgacagatcaaggcgaaagttttccagcggcagatgatgtacagcctctacgatctggtactcctcgccgaacgtctcgtgcgccataagatccggtacaggctctcgaaagcgccccgcttcgatgcgacgggccaacgcctgtgattcgcgttgtatctcagcttatcaagaccggtcgtttgcggccggtctttttctccgatttcgtaaaagcgacgaaacgacagcaggaagaaaggaggtatagacaaataccatatatccgatctaccggcccgcttcgagggaagcctttcggaactctttgagcagcgtcatcaactccaatgcggctttacgagccctccgtccggctgccttgttgcctttgaatcactgaagatatgcatccttctgaaaagctgcgatgcgatcgttgatctgttcgagtaatttttccatatcgatttttatttggtcgttatgaaacaaatataggcaaaatcggctgctgtcggactctttgcccgcttttttatgcatgatacggtatcgtcccggtcggacgcggggcaagttagcggcaggctcacagtcccttatcgccttttccgcgcacgatcttcccttcttcgaacggtatcgcacgcggaaaagtcgcacgggccgcctgccgcagtttccgccccgtcgtccgaccatgcaggacattcggtctggcgacacaataagaatattcaccaaattgtttcgaaccatgaacatctatcggatttcggcggaaggctacgccatgtatctcttccgcgttgcggcgcgtacacaagctgccgcctgtatgaagctctcagtgctgctcggcatagcggccgagaactgtcgcgttatggaaacacttcctctgaacgaccatgtacgggaaatcgaatcctgccgtacgcgggtgtctgcgcgatgatatgctggatggaccagaagagctttacacgcttgacgcttactcccgactatcgaactacttcggagatacagagggcacaaggcttgttggaggaagttttgcccactattcccgatgcggaactgttgtacggcgttttctataatgaaaatacggaatactgctcgttcgaacagagccgtatctgtttccgacgcaacggaatcctctttcggatcaataagcagtattttcccaaaccgacctatgcgatcgacatcgacacctcgaatttcaagcacatagatcttcatatgcaggctcatatccgggataaatatccggcaccgcaccgcatcggtatcctttccgagcgtaaggtcaatatttgggtggactacctgactaagatttggcacgacctggaacacctcgatcgagaacgcaatgcccatatctccgcccatcgatcgcggttgaacaaactcccggatgttaagtggaacaaagatcgggacagaggatctatcgagcgtaacggtctctgctacagtttccgctacgaaacgggcacgattcaggaaaaggtatcgctcgattacggcccctgcacgctcgacgacttcctggctctttcagataaccgctacagaccgaaatgctgaacctttttcaaaacgattccgaatcgggaatgataccctttccggaatatttcatacgcaacctgtatgtccatcgcttccggctgtcgagccggagcgctgacacgcgccgccggatcgtccgctggctgtttctgcatttccacgtctatgactaccaccctgcggatgctgaaactacgggacgctacctttcgcgggaacggttcccgcccctgctctttatgacgctgaccgaggattttcgcaaggactcctcgctgtgtctgcggataatctccaccgacttctatacgctctatctggaagggaacgtctattgtgacggccggtggcataacattcgactgtaacctgttcccgcctgaaagcggcgggaacgcaaacctgttttacgatggcgaatatatgtatcaaccgcttctattgttcgacggacaatgaagcgaactacgaaaagattctctacggcctcggcgatcggttcgacctgtacgatctcgacggccgcgacaactggatgcgcggggagttcgactcgaaatggtgctatcccgaggaggcgatcgcagcgatgatgaagacgttggaaaaggacccgacgcttcatatcgagatcgtctcctgtgagccggggatgcaatacctcgaagcgcatatctacgacagcggcatgtggaatagcttttaataggatgaaacggaattttcgagtaggtgtacgctacacgttcgaaggagcctacaccgttcgggcggtttccgacaaggaagccgcccggcttgttttacgacgatgcggcctgacgtgcggcaacatccatacgacgctcgacgagctcacgtgtccggattgggactttcctacgcatcccgacacacggataggaaacgtcgaaccgatcgagatgccggagcggaaggcttaaaattatcaatacgaactaatctatgaccaaatacagattttatgaggacaggaaggtctcggtataggagcgcatctacttttccatcgaggccgcaacgatcgagacagcggaggctcaagctgcggcgatcgctcacaggtccctttacgctgcggcgtgcgacgacgctgcgatcgaaatcgaggagagcgaaacgctaaattgaattaagacctatgaaacgatttgaaaaaattgctaagcgctatgcgcttgcgaacagctatttcaaaaaccggctgcttatctggccggatacgctttgcgaaattcacgattacctgcaacaacacggtgaactgccgttccgctacgacggggataactggccctacgacgcactgtgcgagcagcagaagcgacgcggtgtccgcctgtcgcagtaccttacgcccgatgctacggcccggcagatagccgcccttgccgtgcggtatttcgagaatgacagccgtatcatggacgtctgctgcggtacgggacaactcacccgggccttgatcgccgcaggcgtacatccctcgcagatcgtgggattggaagtcgaccgggagctggcggacttttacgcacgcctgtatcctgtgacgcaaacgctgatcgggccatatcgggacatcgatttccgctgcgagaacatcgttgccaaccctcccttcgaaacgacggaggtcgtcgatttcctttcgtggcttgcgaaggtacaacagccgggcgaccggagtgtattgctgcttccgcacggtttcatcgacaaacagcgccccaagggcatacaggaaacgctgcggcaattcgaggttctgtaccgtacacctatgcaggaacggttcgcgcggacaaatgtcacagccgaaatagtcgttctggagcgacggtgataggagcccgagattttgtcttcaattaaatagcgaaagatgatattattcccaaacctttttgtttattttcacctctttttccgaaaacttgtacgacgaaatatatcttatgtttttaagcgcatcgagcaatcgaagattggggccgttgttttcgagaattggatgtttgcgatcatgtacggctatatcggagtacggctttggtaatgcggacaataaattctctgtcaatgcgatatttttgggattagctgtaatagcctgcgaaacaatcaggattcgatttttaatattgcttgcatttgcaataacagccaccagacactcttcgtccaagctgatttttacctgagtcaataggatacatatttctgacgccaaatctttattactttcgattatttgagcttttaataacggtattattgtagatttttcttgtaccgtaaatgcattggatgtcaaaagacttaaagcgatatccactgaatattcgatgcaatcgatatttttcaagtaatcgtttttatgatgaatcagatatttaaccaatgtcgaagtcctatgagaagcaatatttgaggtattttcgtatgtgaaagcaatcataccaacatcaatgagataatctactctgtcggattcgagatcggcgagatattggtctgtttttatcagataattgaacgattgggcaatcgtctgatatgctctgaattctaaaatattcgatccaatgagggcatcgaacaaagcctctttttcagcaactgaatcttcgcaaacgtgacttcccaattccgttttatagtgttcgatgtaatgtttcagaagttccgatacctgactttcggaaaatgcgaagtacgccgcaacattctcccaagacggttcgataagtaataactcgatcgccaaatcttttgccccatccgatacgcttgctatgtccgaaattcgttgctgctgtgtatgaagataagttttctttgtttcggaatcaatcatgtcatcgttaagtataatcagtaatgcctcttcgtcctcatcgtttatcgtatgtgaaaattctttcaggcataatacaagattttgctcgacataggaaacaacatccctgctcgcgtattcctttactcgtttcaaatttagattttcgggatttattttgtccataccggccagatagttcaaaatgacacacaagttcccacaattaagagcatatagactgttagtgattacatattgcagcaggtctgctgagtcactatttagccgattgtatttgccattattcgataaccatttcaactgctccaggcctatcgcttctttatggtcggttaagaaagagtaattattatcgagccatgttcgttgttcttcgaacgattcgacaggattgcagaatttgagccatccttctattaaagcagtacgttctgtttcattcggataattttgtattgcctgccaattatgttgtggattccatttgatgaaacgctgaaatagtaattgtgaatggtgcccgttctgataatattgagctataaagtcgagcggggcattgtttctctcaatacgtttcatcaataattcaaacttctcgtgaaattccccattatgaacggaaagacagtctgccaactgaatgtttagtactgaatcgtaattgaatgtagacaacggtatcttcttggcaaagtttccgaccttatcgattttagcattatagtcgcttttgattgcttgcttcatagtaagaagcagatggtaatcactgagcgttatcatgccttcataaaaatatgaaatatagtcgtaatagtcttcgtcaatatatccttgtctgagaaatacattcaacatcggagccaacttgatacctgtaaaatcagtacattgccccatatcgtatgacgtgagtaattcatgcagtcgcaacgatttgatttttcgttcttcatcgtcgatatgcttacgttcgcattggatttcttgcggcaattcttcaatggccctttttcggttccaatagattcgatctaattttaaccctgtgtgaccaatattgaaattggcaggttgtgtgccatacagaatatgatgatattggtaatcgatctgatcttcggatatcatctgctcgaataattcttcatcttttataacctcttttaaagactgatatttttgttctatttttatcgtttgaggtttttgcggcatttcagctatgatttgataagcacatatttcccgcaagtcgttctttgcaatatgagcggagtgatagtactctttgattttttgctccaactgttttttctgctcgtcgagttgctgtaaggcataaacgatgaatttaggtttcatcgctatgcacttatatacatcgccttcccgattgtgcaactgcgcaaaatcttttgggaaataattcttgtaaacgatcattcccagaagtttggtcgggttcaatgtaatttgccctgtagcacataatcgagttctatactgttggtattcgttggcgatattttgaagtaatcgcatatcattaatgaagaaagccatttcttcaaggtcatcatccgcaatatcttcatatcctcgaagtcgaagagcttcttttagtttgtctttcgaattggacggattgataattggaattaccgtcgtaatgtaatcgaagaatttagctcgctgttcgtctttgaatacatcgtccttaaccgcataaataaatacgatatgtcttcctatttctttggattcgttaatgagttggtttagctctctgagttttagatatatatcggaagtgttgaaacgatccaaatcctcgataattaccacgtcatacttcgtacgctggaagaaatagatgatctcatccaagtgtttattaaaaatggatgcttctttgagttcaacttcgccatccttcaaattgaatctgctcaactgatacccgcaaaatgccgacagtatttttcgaatacagaccgatattccgaatagcatataaaggacactaagaatatcagctaccgaattagccaccggccccatgtcgagtattctgtacattgtttctacacgtaaccacgagggttcgaacgcaatcagaaaggctatgaaaaatagaagaatacctactgtccacccaaacaatttccagttatcgaaatgaaaaattcttttgatccgtgagttagggacagttgcgtatttttcacgatagatcagttgttgcagaatactgtactcaatgagacgattgagttgctcgatgtcttttttatctttctttttctcgtcgcgttccaaaagatcatacgattcaagcgttgcaagtgaaatttgtaagtaggtatgctttttataatcctgttgtaacgtataaagtacggtactttttccagagccgtaaggcccggtcaaggctatattgcgtatgaggttatcggtgtcgagtttttctccgatctctcttaccggtagatattgaggttcattttcattgatgaccgttggcattaacgtctgttgctgctcatttgtcacctccgaaacttgggaggctacccgtgttgtctttcttctgatataatccctgatacacataatgacacatgttcgcactatatacaaaattaaagattatttctctgttattgaaattcggatatagaatatagttatatttcattcgatatggccaaatcttttggggctgagatataattcaccttcgcctccggttgcctgcggggaagctcggcacgcgcacggccgctgccgcgccctcgtcggctgcggacgggaaaatcatcctcggcgtcggcacacctccgccttgcggtattttcccgtcgctgcgccgccgtcgcgcaccggtgttcttcccgaggcaaccggtacgtccgggataatacagatcgtctgcccgacagattcggaggcgatggaggttgttccgcgacgctccggtcttcgcttttcatttacgaatctctaaaccgataacgaaccatgacacatgatccgacgaagggctgttataccctcgacacgttacgggcattgaatccgctttacgaccacgaacacggcctgacacagcaggacgtcgaagcggtcaatgtcatgaagaaatacatcgaatcgacacgcagcgccgacaggccgcattgcggcgatcgggtgcgatacgtttcccgccacggcgactatgccggcagtgcattgatcgcctacgacagaaacgatatgctctccgtctgtatctatccttacgatcccttcgcctcgcggacgaacgacggcgtacagtgctgtagcagcggaggcccctttacccatgtcgcggctgccgcattccgctatgagggtccccggcggggttctttcaaaatctggggtcacgacggaccttgcggcaacgggtcgatctgcttcgaagccgaagtcgcggggtggagctaccgcgaacccgatccgctctatggcgactttacgaccgaggcgtggcgcaggctctatgtctatcggatcgaacggccgtacggcagcgatctttaccgcacgaacggccgggagatcggcgacgaagcagcgttccagacgttcctgcacgactacaaagctaccgtatttccgggacgtttgccccggcagctggtcgtctggtgctaccgccctgcggagagacctctgtcgcaggagcagtgggatgcgctcgacgcgccgatctccaattgccgtatctacaacgtcccgcaacccgtgaagattctctacgacgatcttcggcacgaacggatcgtctgttacgttccgcccacactccatatccattaaatccctataacattatgaatgacgacacactgatcgttaccgaaaccgagggtgatacgttcgacttgcagctctcggagtcttcgacgcccgaaacctttcgacgccgggccgcttcgctgacgggaagcggactttccgaatccgaagcgcggcatgtcgttgcgacgacgcccgttccgatggagcttttctgcgactccgagcgcggaatcttcgctgtcgaagccgaaccgctcgcctacggcccgctgttcaatccctacacgggagaggaaatcccgaacgagaacctccgaacggaggatgcgaaactttccggcagccggatcacaacggaaagagataagatgctggaacgatacgaggcgatcgaccgaatacaccgccgacgcctcgtcgatctgatgacaggaatcgtttccgaaatgacgggccaaagcctcgattcgggcaacgaatatccggcatcggacgaacgccaggataaatgctatgtcacagctttccagataaaacatgctgtgttgtatgcctgcctgtcgtacgactacggaggggatcgctgcgtgccggtgcgggacctcgaagtcggacagcttttcgatgtcttgcggatgctgctgcaagacctctgaatatcattccgccccgtttcgccccgtaatcagcgacgattacggggcgcatttgttttaccataaaatttaccgattatgagccacgaaatcatcaaaaacatcttcgtcaccgccgaccggcgcgtgatcgtctgccatgcgtccagcaatatccaaccgcagatttttcatgaggaggaatatgaacccctgaccgaactgttgcgcaaggagggctacgaacgcctggaggaagaaatcctctatctcttttttctgggggtctggcagaacgacctgcggcacggccgtgctgtcgcccgcgctatcgagcaggagcggatggatgtttacgaactctggaaacgatgcgatcgggacgtatcgttccgacgggagtttatcagacatttggccacctatctcgaacctttgacggtcgaattgccgaacctataaaacctcgatacgactatgtaagtgaaattattgcgtcaggccgcaggtcgggatgaccggatcgtcgcggcctatgaagatgtgaccttcctgaacgaacacgtcggatggtatcccattataaaagaccggttccgtaaggcgaacgatatagttgtcatcatactgcgtgtcggcgacgtttgtttcgaagccggaagtatgtttcgcagaggaatgctccgcaaggaatatatcgaagcgcggactgcggaagctcgcaacctgcgagccgctgtgcaacgccgtatggagaacctccaatggattccgtcgtcttacgtggcagcctacgaagcactgggtggggatgcccggccgttgaaggggcatcgcgcccgtatgcgcgaactgtatgctgcggaagaccgaagacgggaacaagtgcggatcgaacgggaaaaacgacgacagcagcaagaggaagcgcggctgagaacgtcattgaaacgggccgaggctgcttttcgggagggaggattcgtcgaaacggaactctttattgccttgtgcggcaaatatgggatcaatatccatccccggacgctcggcatgctgcaaagacggattgccgatttatcccgaacgcagatccattgcaaaggcgtaagccgaggtttccgtaccccgtcgttgcgcggttgccgcgaattgatcgatcgcttggcggaaaaactaaaataggattttcaaatattcaccctgtaatttaactcaatatgaaaattatgtgtcaggagcactacgacgaagtagtgtgttatgccgaacgaatcggcgacaaaacattggaagaacggttgaacgatctgaaacggtgggagcggaatccgaactgtccttgtgaaatcgaactgtataaggattccgcgccttattcctttcttttcaggcagcgctatgccgacggcagtacaggcattgtcggcggactggtctatcacggtacacccgatcgttcgggatgttactgcgaaccgagaatccgcggctgggaaattcatacgtgaaatgcggattctgatttgacaatgaatcttgattaataaatgacgtataaaaaaacgaaccgatgaaacgaaataaaagtattatagaccgctatttcgactatatgcgggatagctggtgcgaagaagaatgccgcacgatcttcggcacacgggctgcgagcgtgtggaaagtgtggtgccgaagtattgcacctgacctgtgcggtgcagcccgacgattctatgtcgctctcgataggggcaatcggcggctgttgatcgagcacattgcgtgtgctgttcgaggacaagacgaggaatgcccttctaaggagccgagtgtccttgtttgcgaaagatgcggctcgcgtgagatacagatgatggcgtgggtcgatcctaatacgttggagtatgtatcctcgatagacgcggatgctgacgatcaatggtgcgacgcgtgtcaggagcacgtatggttttgttcgctcgaagagttcggagataacctcgatgcctggtggttagcagtggacttcccgaaaatggaacggattacgggattgtctgcggcgaattatccggcggatgacgggggacaagcgttcctcgatgcctgcaacgcctggtggaaagccctcgactatgaacgaaaacgggctatttggatggagaacgaccagagtcggacagaacagcacagcgaagacgagagcgaagattattgattgtagaaccgtaccccgagatcggcatagtggggcaagggtaccacggtccttttccgctccccgaagaagtgcagcagttgtttccaagttttgccgaagggatagtaatcttacggtcaagatcaattcttctcatcgacatttccttcgctactacacacttactactataatgatcggtcaggaagtaacgtacctccgaatttgtactgtcattacatatctaagaactctcaattatgtgaatatcattaaggggaagtttaataaatcattgaaaatgaaaatacttctgtcagaatccattctgacaggggaaaagagaaaacattaaaattggaattattatacagcccctttaatttttgtttttcaaacttgtattcagttttattttttgagtctttctaatcgaaatttctcttttgatgatttgctcgtacgcaaggttgttggcggcactgcggttcatttcgtaattatagtggttatcatttttattacttatgtcataacaaatccttccgacagcagtttatccaatatttagtcacctatctcgaacctttgattaaagaatgaaccataacccgaattactaccgatattgagtgtaatacaacaaacgccaccgcataaatccctgcggcggcgtttgtgtcaatgaacaccggaaattgtttaatccttataggaatatagtattatctttctaaatacttctttctctggtggtataggcaaatccactttgtataaatcttgtagcaaaatattgtgttgcctgtattttatttcttttgctgttatatttatcaatttacggcctttcattatataacggtactcagaaaatttatccggatcgagacagaggttgatactctctttcttagatctaaatacaggaacatcaatgggcttaaatctcaaagaacaccactcattatacagagaccgaaccgtatcggatgagttattttcacccaacagatcaagttctttctcaatctgttcatcatctaggtttgtattctccctaatataatccgttaagtacaagaaagtactgctatatacaaagggagtcaagactaatgtatctccgtttatcctgcaagccccgtattcagcggatgaacttcccaaatgattactttccatgagcacaaaggatctattgagcgtatcaaaaaaaaggtatacaaatcctttgattacggaaggtccaaattctcggtaatacagaaacgcactatgattgtatgggggtaaaaacgaaatgtgtcaaaatagaagacagcattaagagggtaaaaccaatgtaaaacagagagataagcacaaagtaacctcggacggttgcgcgatcgaaatgcgacaaagctgttacttttgtgttacatccggaggcatttgaacggtctgttcaagcgataaatgttacatgcccttaaacagttccggaaatgggctaaaatacggcggtgaaagatccgcatcgagaaaccaaaaaccccgtcagaagccaatataacggcgattctggcggggtttcattatgggcggtcgggatggtgtgacggcaaggtgttcaaccgttcaaaccagtgttcaaacggctaaaaatatcctttcaaacgaccatatcggtaagagcaacgatatggtcagttttttatttagatgttcatttagatgttcatttagatgttcaatcaacgccatatctaaaaaacgaaaagttattataagatgttcgtttagatgttcatttggagagtagctacaggtgtattggagtaggtatagagacattttgggtggtctttttggggtgtatggaactattcgagggggggtatattcccaatcacgaataaatacacatatatataatgggctaatacataaataattcggagcatccgatcgtgacggataccccgaaaagcgtgtgtgtgacgtttatatagcgatcaaaaaaacttctttgcgcatccaagaactgcccaaacgcccattatcaatcttttgtcgagttctatcgtgtcgaaatctttatttatcggttccaagaggacttttgcaggatcctgggcctttcgaatccgtttgactgtacggtattcattggtcataataccgtatatctctccatataataagtaagactgccaatcctcgacctttcgcagggcgatgatatctccattgctgatcagcggttccatcgagtgcccggtgatccgtgcccaactgtcagccctattgtattgaggaaagtctatataccccgtcggaaccgccgattggtcattcaccatcatatcaaagcctccgcagaaatctacatcatagaaaggaacgccgtgagactgttccgaaaacgatgcttcgcgtgcatcagtattcagcatattgcctttgccggtcagtagccattctgccgatacattttcacattttgagtaaatcaaatcagcgtctaaagtattacgtgcaatccaattactgatgctttgtggtttaagtccaagtttagcggcaaaagcagttttacttccgcctgaaaaataggctattaatgcgtttatctgctcgcttttattcattttgaaatacttatttcatcattttgtttgtttttacacaaaatgaatatatatttgcatcgaagtttcaaatgaaacctttgtgacaaatatacgaaaataattgattttatggcaaaagtacttgtagaacatggtgagatcgtcaagctggcacagttgctcggggttgcccgcaagaccgtccgggaagctttaagcggccagacgaataccccgttagcctgcaaaatacgcaaactggccctcgcccggggtggcgtcttcaaaccgacacaaaatccgacacaactatgaacgagcagtggattatccgcgagaactacgtcggatcggtgatattcgggatcctggctctcggtggaatcttcggcgtgtgcgccgggaacttgattcacctgttcacgatcattgccagcggctcggtaagttgggcgctgtggcaagaagcaaggcaaatcgaaaaacgacaataatactatgacacactgaaagtgatggcgtaaacctcgacaaatcccgtgaactcgcaggggttgtccggagcaataccggcacgggagctcacttataaaacaatgttattatgaaatcgaactttgttcatcctcactctcatttagtacccctgaaagagattcctcgtgcacaaagagtattactttattcccgctatggaactccacatagggataatgcagaggtctataaaactcgtccggaaacgggaagtccggtagagctttgtataactgccgacagacatcgacaccttcccacaagagcgaaggtccatagcggaacacatcgtaaataaccttgtctaactcctttttggatatctcggtcttgtctgtcgagcgaagatacaccagatcagcctctccgctttcgagtccgaaatcatgattgattgaaatcgcataatcgaggtgataaagccatgcaaaactcttgaaaatatccaagataggtttccgataccggttgatgttcgtaccctcaaaataagagacggttacattcaaacgaaagatcttacccataatcgctaaaagtttgtagttgacagcacaaatatagcgattctcccgtgaacgcgtaaggcgttatccggagcgataccggcacgggagtccaataaacgagacaacaacatgcaacgatacggtcaaacaatagcagtcacggtggaggatctgacgcgcagcgacgacgggaaagcgattatgtcaatgaataattaccgtaatctcgttcgccgtaaacaggtcaatattctccgtcccggcaaaggactcggatcgtgtgccctgatcgagtattcgtcgcttccggagcggttccgccgacggttcgagtccaagtacggcgatccggaggtgctgctgagccgggacaaatcggcgctggtgatcaacgccgaggcacgccgcttctttgccggcctcgagccgggaacattccgactcccgaacggggagacgctccccgacgacaaggtcgaggagtacacgctgaacgcgtctgttctggacgcgctgcacgaggaggtcgagaagcaacgcctcggccgcaaccgcctcaagaactccacacgcatcgtttgggagaatattctggcttcggccgagcgcctgcgggcggatttccaccatacgctgcccaacaacgaagcccgattgaaagacaaggtgcgcacctatgagcgcgagggattcatctgcctcgtctcaaagaagttctgcaatgcgaacaagacgaagatcacacccgagggcggccgactgctcgtcgccctgcgtcgcagccgcgtaccggtctataccctgcgccagatcttcgacgagtacaaccggcgtgccgagcgcaaggggtggaagacgctcgaatcgatgaactcggtcacctcctacctggagcggccggatgtagcgccgaaatggtgggctgcggtgtacggagagctctccgcccgccagaagttcgaccgcaagcagcagacgattctccccggcgtgcgcgatgcgctgtggtatggcgacggtacgaaactgaatctctactacaaggggcgcgacaaggatgggaaaccggtcaagaagacggtcatggtctatgaggtgatcgacgcatacagcgagatgatgctcggctattgtatcggcgagcgtgagaatgccgaattgcagcgccgcgccttccgcatggccatcgaaacggccggccacaagcccttcgagatcgttaccgacaaccagggcggacagaaaacgaccgattcgctgagtttcatgtcgcggatctgccgtatcagccgcacgacggaaccgcacagaccgcaggccaagaccatcgaatcgatcttcggccggttccagcgcgaagtgctgcatggcgactggcggtttacggggcagaatattacggccacgagtcgtgattcccgtccgaacctcgagtttgtcgaagccaacgcggacgacctctacacattcgaggagctgtgtgcggcctatgccgaataccgccagcgatggaatgacctgcgtcatcccgaatcgaagatgagccgccgggagatgtacctgcgctcgcagaaccccgaggccccggccctttcgcagtacgactatatggagatgttctggcgtgttacggagcgcccgagcgagttcacctcttcgggcatcgccattcaggtcgagggacaacggtacagctacgaggtactcgacgccgaggggcatcccgacatggagttccgccgctcgaacaccacacgcaagttcttcgtccgctacgatccggatgacatgacgcgcgtatggctctgcacaaagccgaccgtcggcggcctgcggatggtagttccggccgtcccctatgcggtcgttcaccgcgccatccaggagcaaactcccgaggagcaggccttcctgcgtaaaacgctcgaagccaataaacaagaacgcgttcgtcgtcagatggagggatacgaactggagattgcccatggggttgcccccgaacagcacggcttgcggacaccacggcttcagggcctgtcgcgccgggcacaggagcagctgctggatcgatacgcccgcgatatgacctccgagagcgggatttcggatgaaacctgcgaaccgattgccatcggccaggtcgggaagcagataagcaacatgactttcgataaagtatcattattaaacaaactttaagatatgaaacttactaacgaacagaaagacgagatccgtcttctccttcaaaactatgtggcccggtatccgagccagaacaaggcggcgaactctttggtcgggatctcggccggtacgctatcgacgattctcaacggccgctatgagacgatcagcgatgatatgttcaccaagctccgcgcccagattgccggacagcggggcgaagactggcaactctcgccgacaatggtctaccaggaactttcgatgttgctgaccgatgcccaggaataccagaacgtcgcctgggccgtcgctccggccggggcgggtaagacaaccaccatccgcgacttcgccgcgcgccatgagaatgtcttcgtggtttcctgttcggaggacatgcaccgcggcgatttcatccgtgaaatggcccggtcggtcggagtgaatgtttcggacatgagccttaaagaggcactcgagcgggtcgtacgtcatctgttgacgcttgataaaccgttactcgtattcgacgaaggggataagctggcagattcgatcttttactacttcatcactatctacaaccgactggagaactattgcggaatcatcttcgtatcgactcgctatatcaagcggcgcatggagatcgggttgtcgtacaataagaaaggctatgatgagatccattcgcgtatctgtcgcaagttcgtggaactgaccccggccacctcctacgaggttgccgccatcgcccgggcaaacggtctgacggacgagcgtgttgtcaaaacggttgtgaaggatgccgccacatgcgacttcgacctgcgccgtgtccgccgcgagattcacaaacagaaacgattggccgccatcgcctcgaaataatctgttcaaacacttttcaaataccatccgatcatgggtaaatcactctccgtatcacaggccttgtcgatccgtcggtccacgctccgtctcgaaggaggatggggcaattgcgtgggcgaaatcgaccgtaccggggtcgtctttttctggggcaagtccggtaacgggaaaacctccgccgttctatcgttcggcaaggagctggcccgctttggtcgcgttctttacaattcactcgaggagggtctctccgtttcgttcctgaacgcgctgcggcgtcatgccatgcaggactgcggccgccggttccaggtggtagccggagaatccattgcagatctcgacgaacggctgtcgaagcgcaagtctccggacttcgtcatcatcgattcattccagtacacgcaacttgactaccgtcagtacatcgcattcaaggaacggcatctggacaagatgctcgtcttcgtcagccatgccgacggaaaacaaccggcaggccgggccgcgcggtcggtaatgtacgatgccgggctgaagatatgggtcgagggatacaaagcctttacgaacggacgcttctttgggccaacgggagaatatacgatctggcgcgaaaaagccgaggaatactggggagaccccaacaaaccgaaaccattttcaaagaacgtaaaataatgaagatatacatcagcggtcgcatatcgggccgtccgttggcacaggtcagggaagagttcgagcaggctgaaataaaattgcgaagattcggttttttgccgataaatccgatgaataacggtcttccggccgatgccgcttgggaagaccacatgggacgagacatcgccatgctgttgcgttgccaggcaatctatatgctgcccggctggccaagaagtgaaggggccacccttgagtatctgattgcacgacaacgtcgaatgcggatcttcacggcagaatcgccacttgtaaagacagtagaaagaactttgtaaaacacgtcataccatgaaaaacaagccgaccagttatgcccggttttatgcgcttttgcggcagatgcaaggcgatcgggagcagatcaaagaaacgctcatcctacaatttacaaaggggcgtactacctctctccgggagatgcagaaagacgagtatgaggcgatgtgcagagctatggaggcagagatcgaacatccgggtttaagtaccgaagagtttcgtcgtgaacagaagcggctccgctctgcggtattgcaccggatgcaacgtctcggagtcgacacctcggattgggatgtggtcgatgccttctgtttgagcaatcgaattgccagaaaggagttcgcccggctttcgctcgcagaactcagggtgatggtctcaaaactcgaagcgatgggacgaaaaggatattcccggccccgcagaacaatgcttcccgtcattgttaaaaccaaccaattgccgagctaaccatgaaacctgtaattaaaacgatatctgaagtcaaagatgccaaggaacatcttgaagaccaaatatcctgcttgctgatgcagttcgaaaaagataacggaatacatatctccgatttaagcatctatccgcgtgaaatctacaatgaataagggaaaataacagatcgtcaaatcggaacctcaatcgttgtcaaattatgaccaaccttccttaccgccaggcaatgctgattaaacatacggcatggatgaacactcgcttgcttacgcggggtcctcgtccggaagacgagcggtacgtgccgctcgcggtgcggatgcttacgctggtcggctgcctgaactacgcgatgctcgaccttgagtccgaactcacggcatccggcttgttccaccatgaaaccaaacgccgctatacgcaggcccagactttggtcacgcaggctcacggcatcgcgtggtcgatgcttcgcaagatcgacgaccgggccgcccggcagtacaacgacaagacggacgaggcgtatcggaccatcagcggctgtatcctgttggaggctcctcaaaggtcttacaacatcgtgctgtcgctgtgtaggatcatcagctctctcaacggtcggatttcgggccgctacgacttcaacccggccaaacctcttgtacgcatcccggctctgttggagtgtatcgggatcgaggattgtaaaatagacggaatcatcgaattgaatttaacggactaaagaaaatgaaaaaatacacacaagcggatttcgatgccttcgaggtgatcgacggaatcaaacaatgcccctcgggggattacagtgatatacaaatattcggcgagtggtgctccttcggcgagtggtgctccttcggcgagcggtgctccttcggcgagtggtgctccttcggcgagtggtgctctttcggcaagggctgctccttcggcaagcagtgctctttcggcgcgtgttgctctttcggcgagtgttgctctttcggcgagtggtgctccttcgaagataaaggcgaatatatcggcgattatcctttcctggcttttgtggggttcggctcccggattggcagcaaggtttactttttcaacctgcaagacggcatttatgtccgttgcggctgctggctgtcggatatagcggggttccgggagagagtgaaggcggagaatgccgatgcgatgtacttggatttatgcgatctggtcgagaggaagtttaaccaaaaaaactagaaataactatgcgagcgaacgaatatcagacacgcgcgatgagtacgcggctgccgagttgcgagaatgcgacctatatgcttttcggtctgatggccgagattggcgaaatcgccgacaagatcgccaaatggcgccgaaagggagtgtgccggctggatatggatcatcagctctctcaacggtcggatttcgggccgctacgacttcaacccggccaaacctcttgtacgcatcccggctctgttggagtgtatcgggatcgaggattgtaaaatagacggaatcatcgaattgaatttaatagattaacgaaaatgaaaaaatacacacaagcggatttcgatgccttcgaggtgatcgacggaatcaaacaatgcccctcgggggattacagtgatatacaaatattcggcgagcggtgctccttcggcgagcggtgctccttcggcaagtggtgctctttcggtgagtggtgctctttcggcaagggctgctctttcggcgagtgttgctctttcggcaagtgctgctccttcggcagggcgtgctccttcggcagggcgtgctcttttggtgagtggtgctctttcggtgagtattgctctttcggcaagtggtgctctttcagcaagcagtgctctttcggtgaggattgctctttcggtgaggagtgctctttcggtgaggagtgctccttcggcgagtggtgctctttcggcaagtggtgctctttcggtgaggattgctctttcggtgaggagtgctccttcgaagggaaaggcgaatatatcggcgattatcctttcctggcttttgtcgggttcggctctcggattggcagcaaggtttactttttcaacctgcaagacggcatttatgtccgttgcggctgctggctgtcgaatatagcggggttccgggagagagtgaaagagaagaatgccgatgcgatgtacctggatttatgcgatctggttgagaggaagtttaacaggaaaaattcgaaataactatgcgggcgaacgaatatcagacacgcgcgatgagtacgcggctgccgagttgcgagaatgcgacctatatgcttttcggcctgatggccgaggtgggcgaaatcgccgacaagatcgccaaatggcgccgaaagggagtgtgccggctggatatggatcatttggtcttcaatacgggtgatctgcaagaggtggagggttacaaatccgagctgatgaaagaggtcggggattgtgcgtggtttatcgcgggcattgccgattgcttcggcttcacgctcgaagaggtcatgcagcagaacctcgacaaactcgccagccgccgcgagcgcggcgtgatcgacggaaacggggataaccgatgatctcttatgacccacgcatcactattcagtgggatcggagggttcgacctcgccgccgagtgggctggctggacgaacgctttcaactgcgagatcgatcctttttgccgaaccatactcaaataccactttcccaatgcaaagcaatacgaagacatacgaacagcagattttaccatttggaaagaccgtatcgacgtgcttaccggtggattcccgtgccagccgttctcgctcgcaggaaagtggcgaggcacagaagacgatcgctacctgtggcccgcgatgctcgacgttattcggactgttcgaccccgctgggtcgtgggcgagaacgtttacggaatcgttaattggtcggaagggttggtcttcgaacaggtgtgcgctgacctggaggcggcaggatacgaggtgcagccgtacattattccggcttgcggtgtcggcgctccccaccgtcgggacagatgttggtttgttgcccaccgtacagacgcaggggctgaagcgatgcgtgaacgggaagatggtttttatgccgttgagcctgttgcccaccccgacggcgatagacgcaggaagcggccgaatgaacaaaagcctctccccgaatgcgtcggaacgtccgacgctggcaatggcgtcgaaaatgggattgttgcctactccgaccgccaacgatgcgaagaatgtaacgcttcctgccagtcagggcatacgcaacggactacccaaaacagcgatgcaaagcgacgaataccggactggaacgggttcccgactcaaccccctgtatgtggcggagatgatgggtttcccggggaattggctggtatcgcctttcctcggtggcgccgggaagccgtcaaagcctgcggaaacgccatagtcccgcaggtggcattgcggatttttgaaacgataaacgaatacgaagtggtgaaacagcaggattctcgcaaaatatcgaaataattatgaaaccaattgaagagagggcaaatgctgcatggtctgactatgaatacagagagggagaattgtactcaacatgctttatggatggcttttccgccggcgcacaatccgagcgcgatgaattgacccgctggcgtgacccgaaggtggagctgccaaatgataatcgagatgttttagttaaaacaacattatgccgtgaatactgcattgccttttacaaagcaaatgggggccggaatcatcattggcacgagaacaatggatctttagatgacgatatggtcatcggctggcggccgattctcgaaaacgagtaagatgctttgtgcattttaactaaccaagtaactaaccaagtaactaaccaagaatatctatgaaaacacgcctactgaaacgactgcgacgggaagcacgcaaagagtttccggatgatatgattttaatgcttgccgagtgtaagggctatttcggagcattaaaatttgtcaatgaagcgatgagaagtcacatcctcctccgcgttgcggagttaaaaggaaagagaagataatgcaattataaattgtatggatattacgaaaatgacagcagcacaacgcgccgaactgaaggcgcagcttgaggccgaggagcgtgccgagaaacagaaacgcgaagagagtattgccgcatacaagtcgtcggtggatgagttctgccgcaacaagtttagccggttgcaggcgttgagcgaggagatgcgccggctgaaagaggaggttttcggcgatgccgaaacgctgatcgcgctcaaggatgagttgttccgaaccaaatcggaccgacacagcaatcaattcacgacctccgatggcaagatcacggtggcgctcggttatcgcaccaacgacggctgggacgatacggtgaatgtcggggtcgataaggtcaaaacgttcatcaaatcgctggccaaagacgaggattcggcggctttgaccgagatggtcatgaatctgctggcgaaggatcgcaagggaaatctgaaggccagccgcgtactgcaactgcgcgaaatcgcccgcaaatcaggctacccgcaactaattgaggccaccgacatcatccagaacgcctaccggcccgtcgatacctgtcagttcatttccgtctcctacaaggacgacaagggcgtgaaacagacattgccgctctcgttggcggccatggagtagtcccgaacggttgtctgcggcggttcgattccgccgccgggaacattgccgaaaagtaacaaattttgtagctttgtatgtatttaactaaaaatataattttatggatctttatttcgtaattcttggaattctgttttttatttttggactcctccaaattattctgtttttcaaattatgggctatgaccaacaatgtaaagaagattgcacaaggcaatgattctccacatgttgattggcaacttcgggcttgtgttttaactggagatatggatcgcgccgagaaattgataattgaagattttgtcgaaaaggtgcgattacatgtcgtccaacacggtccatccgaatccataggaccgatcaaaaatgcgtgccgagccagattcaaggcgatcggaaaacagatgcctgaagccattgaaaaactccagaatggagcaaatatcattcagttgataccataattatcccgtttttatatgcgataattcttattcctgtcaagagattcgatgtaaatatgtatagagtgcgttttattttgcaaaggcccggctatcgcaaatgctatctcgaaggcctttatcgaccaagaggtaacctctcggtcaatgcgatgcgcaaagcctgtcaggaggaactccgacaatatttggaggcacaagatccggaatatcgtaaattcgacataaaactcacatatttcaaccgtcttcgcattgattttctactgaatgtggggattgtttgataacataaaaacgctgccaagaatcgaaaatcggcagcgtttttgtttcctccagtgcaaaatttcgtatctttgcaatatgggtaacacgtcagacaatcaactcattcttttccactgcccgaccattgagaaagccgggaaccggcggcgtacacgttctctgccccgttcgggagatggaaacatcacgtcgcgtgcagaccgaatcgccaagcgcaaccgcctcctgacggcccgttattactactggacagagttggagcggcgacgtttcgacgatgtgctgaagatccttgccgacaatgaatttttcgtcgaggaccgtacgatcagcaacgccctggtcgccgaggacgagttctacaacaagctgatccgtcaacgtacgaccaaacgccagttgcgtcggatgtttcccgggttcgactggggttaatccataaactccgattcgtagatcatccggaatattttcaatccgttcgacctattctccgttaagaccgacacccgggatgtcggattgatcttgcgtccgaaagaccaccattgaagcgccttgtgtatattctgcagggtgtcgtactgttgaagcgctttttcacgactctcttgcggtgcggatgcgtttgccgtaccccagacgttgaatgccacttgcagttgaaatctcacacgcacgcgttgttttccggccatgtgggtcgtgcattgcgggtagctcatctcgaccaggcagcaggggaaggccaccggaggccgttccgaaacattgagttgtccctgatccgaatcgatccatcgcaattcggggactttgtttttcagctgatcgcacagggcgatgaagagttctttttccataatcagttgtttaatacggattccacataagtctcgattcttttttgcagctcggtttcgagttcccgggcgtcgccgataaactgtcgccggggaatgttcacccttcgggtgtgctgccgaacgctctgatcaccccggcgcgtgtgccggatatgggccggaaccgcaaccgcacctttgaatccttcgttgtgtacccgggcatagtccactttctcgtttccggccgcgatgacgatccgcccgggcgtgaccacgacaggccggatgctgttgagcaaagctccggactgcacgagcagtgaccccgattgtttggggacccggggtggtgcccacggattcccgtcaaaggccttgtgccggaacgtgtcctggaaatatccgacggatgtttcagcgacgatttcagccgttccctgcaggatctcctccatacgcttctcgaggagtttgtcgatttctattttcataaaaattttgtatatttgttccgaagcgtacaattccgggggtgaatcgaattctgctatccctcgcgggtgatgggggcatgggaccaaagtctgggcttgatacagcggatgagtacgttaacccgaagcagcggtatgacactggctatccaaggcgttgcggatacctgcaggacgtgttcccaaggtaaacaacagtacgtccggacgcaaagacatgccgctacgacttttttataagcaagccccgtcggtatctccatcgcgggtcaatgtggcggctgcttcgcgttttctgtttcaaattcggagtctgaacgatctcgaaccaggtcgttatcctatattcgagattttcatccacttcacagatcacgtcgatcacctttccgtcatagaattttatgaaattcatgttcctgaacggtctgtgataatcgttcaaccaaacctcgtcgggattcttcagcacctcttcgacacatgccagtaacggcacccgcactttctcatagttcccggtcgtatgagttcggaacaccttctcgtccataacgacttcgcggcctttgtagtcgtgtagcgtcttgtgagcctcgtaccattctgcggccgaaccgctgtattcgggcatcggttccgtcgctgccgccaggcgtttggcaaacgagtcgagtccccagtcgttgtagtagagtcggccaagtagcttcgaagccttgttctggaagcggcggatgtagaactggttctgcgtgaacacctcgccggtgagggcacggtttacgccccaaccctgtgctgcggcttttttccacgtcgccgttccgaagaactcgtccacgcgctgttgcgaggcttcgaccgtctctttcttgacctcatgggccatccgcggcacgacccggcagcgacatcgccagtcgttcggcgggaagatcttcttccatctggcatcgttgtagggaaggacgatcccttcgagctggcgatgagacggacgcacacgatcgtctccgaccgtccggtactcccagtaggggaacaactttgtcttgcccatcagccgccggtaggtgctggcggcttcggccgtaagtagtgccgtgtcgtactcggtacgttgccagtcgcggttgaatgccgtacaaatcttgcgggcctcacgttcgaagtcggcgaaattactactttcacggaagaggcggttgagttcctgcaattcggccagggttttggctgccgagaactggaacaggttaatctccatcgctgtctgtaaagcgtcgtcacgtactccgtacacaaccccgatatcagcattcccgatgctgtcagcttccggttgaacggccttcaaaaggtcttcggaaaggaatcgaaatagctccgtgtcgaacgcgggctgcgaggcggccacacgtcccatcagcctctcttcgagcgtatcactgtcctgcatccgcatgagggcagtgccatcgaacgccccgccctgcggggctttgatgaaaaaatcccataagcggcgccaaatgttccggttgtcggcattccgcaccttctcctcgacatccgtatccgtttcaaggtgcgagcctaataccatattcgacttttctccggcgatcacctctcctttgtccggcatggggatcgaatacttgtcgtgaatgaatgctgcggggatatcgatgatcgtcgagagcttcacgatttcgtccacggagagcgggtcggctgccttcggatagacgaagcggccgcctttcacgggtaagccgcaagtctccagaacaggcagcagccgttcattgagcgtacgttgtacaaaacgcaggtcgctcgtgtgtttcgaatcctcgacctgcagatgcacttctccgagcgagcgggctccgcgctcgccctgaatggtggtcagcgtctgtccgaggatcgtgataagcatctcttcattcgtcgcctgacggaactcattgaatgacgagccagaccccctatttacctctttggtttcaatgtctgcctccttggggatgacgagataaggtgcggatccggcctcttccaaggcttgcttaagcagttcccggctctgtgggtcgaacgtgttgtattttccgatacgctgaggcattccgaacagctcgatccattgagcatagtcgccaaatccaccgcgtttccagatagcatagggtgcagctttgagcagcagcccgtagtccccgggacgaccgacgaccagaaggttcggatcctggtcgtacggtaccgatcgatctcctgtgtcgttcagcagaatctgacagttgtccaggtcgatatacttgggtttgataggttcgacgtggaatccgctgttgaaaaagagctccacgcccgccctgccgtagaacagccggtgcatgatttcgcggatgagcgtttcccaggctgtcgtgtcgatcatcgctgcgatggcgggttcttcctgtccccgggcattcatgaagacgacttcagcattcagcacggcctcgatacgtttgttgatcgcatcggcgagaactccgtcgatcatgatgtcttcgaacaggtcgtagagatatttcggccgtccgttgtcggccgagcgcaaagctgaccgccaatctccgatgtcgtacacgcgacgctgcggagcctggacaacgatctgctgcaccactatcggctttgaggctttcgtgccggaactctttcgggaagatgtcttataacctatttgtgccataatcaaaaatgttgtgatcgttttgggttcgacccgaaaatgtactctccggcagcggggtcgggctttccgtcgccgtcggcatcctccattacgggtaggttgggtttgatctccgagcgctggacggacttcagccaggcgacggcccgttcgtatcgatcctgccggagctggagatccgttcctgcattgcacaggttgatgaagtgccatacggcgatgtccttgacgaaaattaacagcagtgcgttacgttcgtcaccctcggtgccgaagatcttcttacggtcataagccccgagataccccgaggcctcctcaatggcggcatcgatagccgcggccacgattgcatcgtcctctcgggcgatggtttcgatattctctttatagagatgcgtctgcaactcttcaggtgtcagaaaagccatattagaaacgttttgatgcgcgtactcgttgaccgatggtataggatccctcgttgagcgtggagatcttctggttgatgatccatacgcctccttcgatgcagtcagggccgtcggccggagatttcatttgtcggttgagcagcaggaactgctcttcgaggcgtttcatgtgcggattctctcgttcgtcgatattcagtaccaggcgcccttggcggatcaacggttcgaggtttccctcgatgcgttcgaatttcggcggtttacagcgacagtcgggtgtgatgccgatgaatccccgttcgcgggcgcgggcggcgaacattgggaggaacacctgctcatagaaaggatcctgcaggctgttgttctcgatgaagtaataaacctgcacacgttcgctcgcataatcgcgcaggttgtagaaccagtccacgaactcgtcgttggtgacatggtcgagaaatcccgtatagacgtagaatgtcccgtcgcagtaaccgagcagaaaatccgctttgaaactcgatgccttgttgcgggcgtttgacggagaaggatcggcgtaggccactgcgaactggagccgttgcatcggcggacattttccccagatcacctccttgatgacctcgccttcggaaagcggattgttcatatactcctgctggaaggctttggtggaaatggtctgctcgatgcggcggatacgctcctcggtgttcttctcgggccaggtcgagcggccttcggcatcgcggatgttcacaatatcccaatggtcggccttggccccggcccgcgtcacacagcaatcccgggcaatgacgttcccgcagaacacgaccagcaggtcgccgctcacggatcgggttggaatcagggcttcctcgaaccactgccacttcttttttacaatgtcgggattacggcagtcggcatccgtgtcgaagtcgtccgggagaatcgtatccgggcgaaaggcatccttgcgggtgcctcgcggcgattccattgcaccgagcgcccggaatgccgcgcccgaggtcagcgagaactcgtcggcggtccagttgccggcctccctcaggtccccgtagtaagcctttaacagtgaattttgttcgaaggacttcttgtaaggatccagaagccgcgtggcattctcatggctgttggaaacgagcagcacgttgcgcttgcgtttcgtcagtacaagatacatgatgcacatgaagacgatggtcgatttggccagctcgcgtgaccacgagagcacttcataccattccggattggaggtgatccgccggatcgccttcttctggaaggaagtgaagggatgccgggtgtattcggcgaagaagaaaagcatccacgaaacgggatccttttcgagcttctcgagtcgcctcatccgttccacaggtgagagtttgtccaccgccttgtcgcgcttcagggcacggtggtattcacgccattcgttccaggcgcgcatgtcatctactttacccatttcagccgttcctgtatgtatgaatcgaaatagtccgagagcatcttggccttctccaggtcaatagctcggacatagtcgagaatatctcttgacacattgacaatgtcccgcacggaggcctcctgttcgagcgcctcgaggtcggcggtgagtttgcgccggatatctgcctccttgaccgtcggatagcgcgcaccctgctcacgcgccgcgatgctttcgtcgagttcgttaagctgcatgagtgtcgatttgatccgtgcctcacgggtttggaggaaattcaacttgagaccctcccactctttggcccatcgtacgatagtaatcctcgagacaccgatcttcacggcaatctcggcttgggtgagatccgtagtgaggaaaagtagtttcgcccactccttcttctgcttgttatccaactcttgtgtcatgaaaaatctctgttttacaccccaaaggtaagctcttcacccgaacggagcgaatcgtggataaatggtctgcatgtaaagtgcaattaaagcgtaataaattgtaaaacaatacaatataatttgcaagacgggtgttttcaatccaattttgccgaaaaatgatggcttttatgaaacgatttacattcgtgttgcacgacgagacggtcaatacctacgggttccgtatgctcaccagcggcgctaatctcgaggagttccgtaagaaccccgtgatcctgctcaaccataaggactgggagcttccgatcggtcgttgggagaacatccgtattgaaggtacgcagatccttgccaatgccctcttcgacgagaaggatgacgaggcggtgaagattgccgacaaggtcgaaggcggattcctgcgcatggcttctatgggagcctggcctcccgaagaggtgagtgacgccgcagagttgaaacttcccgggcagacgcttccgaccgtgacgcgctggacagcccgtgaagcgtccattgtcacgatcggggccaatcataatgccctggtgcttttcgaccgtcaaacgggaaaacctctcgatctcacggatgcttcgactgtcatccggcttatggacaggctcaatcactcaaaaatcgattcgaatatgaacaagactttgaaggaagtcctcaagttgcaggactcagcacaggatgccgaggttatcggcgctgtgaaccggctgatcgaaaacaacgaccggctaacacgtgaaaatcaggaactcagagatgctgcagcgcgtgcggagtccgagcacaaggagatccggaagtccgaggcgattcgcctcgtggatgcagccattgccgacggaaggatcaataccgcaggcaaggaggcttatctgaaactctttgatacggatttcgagagtgccaaagccaccctcgaagccattccgcaccgcaaatccgtcacagcgcttatccgtgagggtgaacgacggcagtcggtcgaactctccgaccttgtaaacaagtcgtgggaagaactcgataaggcagggcgccttgttgaactcagggacaaggcgccggaactcttccgtgagaagttcaaagcggccttcggtaccgaacctaacatgtagaactcatcaaaaacaaaaaacattatggctattcaaaaagaaatctgggagaaatcgatcgtcgaaggtctgttcgctcccaacagcttcctttcgaaagcgttcaacgccgacgagtatgtcgaagcgggaaagatcgtgcatatcccgcaggcaggtgccgcttcgaaagtcgagaagaaccgaacgtcattacccgcaacggtaaagcagcgtaccgacacggacaaaactttcgagctggctgctttcacgacggatcccgttttgatccccgatgccgacaaggtcgagctgtcgtacaacaaacgcgagtccgtattacggcaggacaagctcgccctgcatgaggctgtggccaaggattttctgttcgcctggagtcctgcctcggatcgtgtgatcgaaaccacgggggcaccggtggatgcttacacaccttcggcgacaggcaggcgaaaagggctttgcagggcggatattctgacgctgatgacgaaattcaacagcgagaacattccccaggagggccgctacctgctgctcgatgcgcagatgtacgcacagctgttgagcgatctcactgccaatgagaactccgcattcctcgcctcggcggatgcccagaacggcatcatcggaaaactcttctcgttcaacgtcatgatgcgttcacaagctacgctctacactgcggataaagctccgaagcggtggggcgaaagcggtgccgccacggacctggccgcagcccttgcctggcacgatcagtccgtatgccgcgccttgggcgaagtcaaggcttttgagcaggagaaagcgcccgactattatggggatgtctactctttcctcgtacgtgccggaggcagcatcatgcgcggcgataatgcaggtgtaatggccctggtcggcaccgcaaccgagtaagccatgaaaccggcggatttcaagcgcacctattatccgacaatcgagcgggtctgcgccgaaacagggttgaatcctctgtttgttgcggcgcaggccgccctcgaaagcggatggggcgatcatgctatcggaaataatctcttcggcatcacggccggagataagtggaccggaaagcggcgaaccgaacggaccttcgaatacttttcggatgaccggcagagcggacgattcgagaaggtttattcgatcacccggacctccgacggacgctaccgttacgaggtcgatcgcaagtttcgcgactacgacacaccggaggagggcatccgcgaccatgcgaaggtcctttccgccaaacgctacgcagcagcctgggcgtatcgtaacgacataacacgcttcgcttatgagattgccaaggccgggtactgtacggcagaacccgcagcctacgcggatttgatctcgaagattgcacgcatgatcgaacgggcgtaaactaactttcaaaaaccgattgaacgatggacagcatttggatgcagatactcgctttcgcacttcccgggggattcctcggcagcgttttcacctggatcttctcgcgccgcaaacagaacaacgactttctcaaagagttgcagagttcgatcaacctgctttcgggcgaaaacaagaagattctcgaggaaaacatccaactgcggcgggaaaacatcgacctcaaggccaaccaggaagagatgctcgtacgcatcgaccggctgaccaaagaggtggagcgcctccgcaagaccatcggaaaacgaaattcgtatgaagacaagactctttttgctgctctccatcctgctgctggcaagttgcactgcgacgaagaagctcctctcgacagggacgcagaacaggacggataccgtgtcgcacatgcagcgcggcgcacaaaacgccgtagagcaaaccgcacgagcggcaatgaactctcgatcggaggagacctctgtgctgcgggcgctgcggacggaggcgattccgcttcggacagcagcggtgacggtgacggaggagagcctccgtaatctgccggagggggcggcctatgttgcccgtgacggtcggctgacgctcgaagcccggcgtgacggggataccatccgcatttcagcacgcagcgattcgcttgcccgacgagtcgaatattacaaagcgacctcggcccggcaggaccgatatgcagattctctgaaggagagtctggcagaaacccgggaagcatacgaccgactcctcgaagtctccaggcatcaatcttcggaaacagcaatacaacaaacgcggtccccggcctatcggggaaggtggatgcttttcggaatcgttatcggatgtctcggcggctggtgggctcataaaacaaacttatttgcaaaacttttcaaaacaatttaattatgtctaaacgatctgtaattcaaactaacgacggctatctgatgctgctcgacgctgtctatttcaacggcagacgcatggggaacatttcggaagagggccttgactggggcggtgaagacgcccagaccgtcgaactctgggccgcacagattcggaccagtcccgtgctggatatcgaaacgcgagccgcgacgaatgagattaccggaaagatgatcgaaatggttccccagaactgcgtcgatctgatgggcggcaaagtcgcgggtgaggagtggcaaatgcccgccagctcgatgcgtgtcgaaggagatatgcgcattctgaccggtacgggtaagaccgtcaaactcaagcgcgtttcgttgcgtgcctcgaagattcgcggcggcttgggcggcgaaaacgtcctcggcatcgaattcggactgaaggtcctggctccgctggacggctcttcgcccggttcgattctgccgacggagcccttcatcgaggccgacccgacgtcgctgaccttcgaacaggcgggcggcagcctcccggtcgatatcgaagcctcgggtccgttctcggtaggtgctgtgcccgaaggcttctcggtggaagtcgtgaacggacgtgtcacggtgatcgccgaagccaattcctcgggttcgtcccgctccggaaatctggaattcatcctggagtccaatcctgaaacaaaagctaccgtatcgctttcgcagcccaatgcctaagccatgaaacgcaatgtagaactggaggcagcggaagctctgctcgatgtggggattctgctgcctcttctccggttccgcctgcccggaggccgggagtgggtgctgcgcgtaacgatgcggcgcccctgcctgggagggcagatgcgcatcgtacgccactacctgaagctgggaatcacagcccgggaatgggatgctttctccgaagatgaggagcgtgcctttttcgaccggcatgccaaacgcctttcgctgatccttgcgctgacgatatgtcgcggctatctgtccggactcctgctggcccccgtggtggcctggttgatccggtggaaggtgccctccgagtaccggatcgaagcccagcgctggttccgcagaatgcggggcacgcgggattttacgagtattatcgaatcggccgagaggatcgatcccttccggtacgaagcgagccgccccaaaagagcaggaaaggggagttaagaaccgtttacgagagttcccatagccccttcggaatcgtttggcaaattgcctccgcaacaggatggtcggtgcattacattctgtggaaggtcaatttccagacactggccatgatgctggccgatgccccgcattatcgaagcgtcccggccgaatgtacggaagccgggagtgcaacgggaaaacccgataccgcacaactctttcaatcgaaactcaacttgcaatgaaacccgtcgagatagaattcctcgtaaagaacaatacccgccagggactctccggagtttccggcgggattgatgccgtggacaaggatgccgcgcaggcgcgaggccgtattcaggctttgaaggatgaaattgtgcgacttcagaaagtcatagcccagacgccggaaatggatcagacggaaaacatccgtcagatagaagcattgcagcggcagctccaggctttgcaagccgcgaccaaacgcaccgatctggttcctgcaagcgctccggcagccgtaaggagctataatagcctacatatggctattcagcaaataattcgtgaatcaccgtcgctggcaatgggattacagttgtattttctggcagtttcgaataattatcctattctttgggatgcaatagctcgtaccagggccgaaaatcagttattggctgccagtggtgaaaaaacaattcctgtatggcgacaaatactttcctccgtaggctcttttcagactttattgactgtgggtattactttggcagttgcgtacggcaaggagatcggaaactgggtgacgaatctgtttcggggaaagaaggcgctcgacaccgctcgcatggcgactgaacgttttcagaatacgatgcttgaaggggcccggaacgctcagcaggaggtcgtaaaattgaatcttctctaccgggccgcgacggataacgcccgcgccacagacgatcgccgggaagccgtgcgcaaactcaaagaggagttttcgggttatttcaagaatctttccgacgagcaaatcatgctcggacaagcgaatgacgcttacgaggagctgatcaaaaacatttacaaatacgccaaagcgcaggcggctttcaagagtctggtggatatcgaacagcaagagctgttcttcaataacacaccggatatcgaacaattccaaaaggcttatgacaaatacctcgaggcccaaaaggatgttgctgacaaacggaaaatctacgatgcggcgacatggacccaacggggcaatgcgtccaaaatgtacaaagatctctcttgggcggaaaccattctgtcagatgcagaagaaagtgtttcttactggcaggaaaggatttttgaagagatcaggaagaacaaaggaggagaagagattatcaatgagatagaggagaaattcgatggcaacctcggggcatttctgcaattcctcgcagagcagcggacgaaattggctgccgtggcggagcaggcccagttgctggaaaacccgtccggcacgacgaccgatcccgaaccgacttccatcgaccaactcgaagaacagtataaggcggccgtacgtcgccaacagcagagcctcgacgaccagcgggccgagttgattgaaaacgaattcgaccgggaacgggaagcgatccgcctcaattacgagaaaaaccgtcaggaatatgagcggcaggaacaacagacgctcgcgctgattcgcaaactccgggagtcgggggccgatatcgattcgaatgcagagaaaacctttatggctggcacggccgctgcaatagcccaagctgcggaaattcgggacagagagcttgcggatgtcgataagaaagaggaggcttcatacgccaagttgctggagaagtacgaaacctaccagcaggggcgtctgcgaatcgcccggaaatacgatcaggatattgccgctcttgcctcaaatccggaggcccagcaactcgctcgcgaggccaaacaaaaagcgctcgacgacttcacggaacaatttgcaagccagttcccggaattcgaagcctgggccgaccgggtcgtcgctgcctcggtcaaaaagctggaaagcctggtgatcgaagctcaggaagagctggagaacctgcaaagcgagacgccggatgacggtaatgccattgccgttgcacgggccaaactccgcatggccgaacggcggtatctggcgaaaaaacagaaccaaacgaaacaggaaactaccgatacgacctcctggacggagcttcaccgcgtattgaccgacgttatcgacaccttcaatgaggtcggcgatgccgtcgggggtgccggaggaactatcatcgccaccgcaggagatatcgccggctctaccctgcaaatcatcaatgccgttcaggcataccggaaagctcaagccgcatcgaacacactcggcatggcctccggaattctcggaggcatatctgccggtatcggtgcgctgaccactattgtcaatttgttcgagggcggtgaaacttcgatggagcgcaacctacgtctggcccgcgagttcaacgaagaacttcggatcatgaaagagcgcagccgcatcgactccgatgaattcgacaatatcttcggggatcgggtgtacgaccgttacaagcaaaatatcgatgtggtgcgcacctcgcttgaagagctggagaaagtccgggagagaatcctctcgcgcggggaagaaaaatatcagttgccgggagagtggcgaggcggagccggcacgggactttcgggcttgttcaggtatgaaaaaacttgggagaacattgccgattcgatcgccaacatgcaggttcagacacgtcactcgacctggttccgttcggcaaaatatcagtccctcggttcgctgcttcccgaattattcacggatggcgaagtcgatatggacgcgctccggcaattcgtcgaagagggcggagaaactttccagcacctggcacgggagaatcaggagatgctccgcgaaatggtggacgactgggaaacctacgaagaggcattgactgcggtccgagattatttgcaggatattttcggcgatctgggcagtacgcttaccgatgctttggtggatgctttcgaaaacggcaccgatgcggcgaatacttttgttgatagtgtcggacaagccttgcgcttgctgggtaagcgtatggcctcctcgatcgtgttcggtaaattattcgaagatacccaaaaacgcatcgaaaaggtcatgcagagcgacctttccgacgaagagcgtttcgctcaatggagcgaaacgatgaaatcgctggtttcgggcgtcatggatcaacaggacgatttcaatcgtctgtgggaagagttccgccgcattgcaaaagagaacggattttcgatcgacgaggaagccggcacttcgcagcagaacggtaaggccggagccactcagactgtaacgcaggattcgttctcccgcgtcgaaggactggtcacatcggtacagatccattccgcgaatatcgatgaaaacaccgaaggtattgtcccggttctcaaagggtcgctcgaagcgatgaatgccatccgggaaaataccgaaccgataccccaaatctatgaactgttgcaaaccataaaacgcgacggattaaaagcgatctgattatggctgaaatactcgaaggactgttgctgatcaaccaaacggatgtatatgcccgtttcggggctttcctcgcggaaaccggcgaagacagacacgacaactacgattcgctgctcgcacctccggctctcaagcagcaggcggaggtttccattcgggaggaggacggcgtccgtatgcccgatatactgacgcagacttatgaagcccgtgatattacgctgcgattcgccatcgtcgcctcgaacgatgtttcgttcttcacgcgctacgcctcgttcgtgaaatttctcaaggagggcgacgacgggtggctggcgctccatctgacggacgtagggctgaaattccgggtttatatgaccggattttcggattattcacaactggcgccattcggaaagggagaggttgcggcgaccttctcggtgaaattccgggagccgaagccgacattcgaactcgctgcgtcgatctaaaggtcacgttcaaatcttcaaaaaatggaactcaaaatatattcgaaagaagggaatttgaagctgacggtctctcccgatagtaacagtgctgcaacctgcggcatacaggaggagagtgtcctcgcgctctccttcacggccttcgaatgcgtcacgctcgaagtttacgattatgcggacttcctcggacggcgttattggattctcgaacgttatcagccgaagatgaactgcgacagcgagtggagctattcggtgcaactgtcgggggtcgaaggactcaccacgcaggtcctgatggtcaatccggatgatgacgacaatccgattctgacactcacggcaccggcacgcgaacatgcggcgctgattatcgctaacatgaaccgcaaaatggggacgaccgaatggaaagtcggagaagtggtcgtatcggagtacatcgatatcgaatatacgggaaagtacgcctccgatgctctttcggaattgtcgtctgccgccgggacagagtggtggttcgacgggatgacgctcaacatatcccgctgtgagttcggcgagcctgtcccgttgtcttacggcgacggattgatcggaggaatcgaacggagcatggccgatggcgtgaaatttttcactcggctcttcccggtaggctcctcccgcaacatcgatccggatcggtacggacatgcccggctgcaattgcccgacggggcaaagtacgtcgaacaggatacccacctcggtatcatcgaatatttcgagcaggaagcgttcgatgcgatatatccccgccggatcggtacggtcggttccgtacggtccgaagagcgcacaagcgatgacggctctccgtttacggtctggtatttcaccgatcccgacattccgttcgatcccaatcaatacgaaataggcggcctcgtcaaacgggtgacctttcagaccggagagcttcgcggacgggagttcgaagtgaattacgactcggaaaagaaggagttcgagatcatcacccaatggccctacgacaacgatatgcagttgccgtcggaaccgttggtcccggctcccgggaacgaatacgtgctctggaatatcagtatgccggacagttattatcctgcggccgaacaggaattcaaaactgcggtagatacctttatggccgacagccgtaaagatatatccgtgttccaggcatcgacggattttacggttgtcgataaaagaaacctcgatttgaagccagggcaacggattcggctcggaagcgacaagttttttcccgataccggatatcgcgatatccgtatcgtcgcgatcagtcgctccgtcgttcagcccggaagcatgactcttaaaatgagcgatgtcctctccacaggccgtatttcccgcatcgaaaatcagatttcggaagtgacgcagataacccggcaggtttcatcggaatttcctgacatcattaaatcgtgggaggaaacaccggcgagcgacacgacgctctattcgtcgcgtaagagcgaacgggaatttctgaacaagcgccggggaggtacggtcgaaggaatcacccgattccttaagcggcagcaactcgacgagggattccggacaagcgacttcgccagcggcatcaccggcttcggtgcacagatcgacggacgaggcgccggcgagctggagagcctcttcatccgtcgttttctggaggttccggagcttcggtacaaccgtgtgggcatcagcgtcggggatgactggagcgctccgggcgccggggtgatcgagagtgtggacaaggatcagaagctcgtaacgctcaaactcgaagagggcgagatcggcgccgtagcggtcggggatatctgcatgggtatcttccacgacttcgacccgtcgaacaatgcgacggcagattccgacgacggccggggcaacttctctttctcaggcttcgcaacggtctatttccgtatcacggaggtcctgggcgaccgcaacgagcagttccgctacgggctgcgccccctgtcggccacctttaccaagcagatcgatccgatggaatcgatgaccttcgtagcctacggatcgttcacgaatcccgcccggcagagctcgcgctactcgacgcgcacctaccagcgttatctccgcaatgtcagcgactgggagtttacggccgagaatatcgccgcgcagttcggcgaccttacgaacctctccgtcttcgggatccagatgtcgggctattcggcctatctggataatatctatctgcaaggtatgatcagcagcctggacaagaaggcgctgctggacacccggagcaagctgttccggctggtaggcgacaacggcgtcggcgtggccttcaccccggaggcaggctggaagcaaggcaagctctacgaccccgcgacgggacagttccagaaggagttcgacatcgaacagatcgatcagacggccaccgaagcccaggccactgccaattccgccgatcgcaaagctcagcaagccaaagattacatcgataacacgctgcccggcgaattgtccgagatcaacaaacggctggacggtgtcgtggaaaactggttctatccctatactccctcgctttacaatgaaccggcccaaacatggatagcggacggcgagcaggaaaaccatatcggcgacacgttcaccaatacgctgcccgcgaatttcgacccgacggacgcaggctgctgggagcagggcagcatcggtgcatcctatatcgacggcattaagacctgggatcagatcaaaatcgccgacagcacccgcatccggctcaaaactccggtcggaggaatacccaaaggcgccgtactgtcggtgggcgaaggctatacgatgggttacaatccgatagcgtcatccggagcggttatagcaagttacgtatggagccagagctatactgtcggaagcgacaatccctacatggcttttgtcatccgcaaaaccgataatgccaaaatcactccggcggaatacccgcagattcacttcaccatatcgagcgacgagacgacgaaccccgatgcgggcaaatcgtggcggtgggtaaaagaagaggacggaacctataaatggacgccgatcgccgacagcgatgcggtaaaggccctgcaagaggcggcgcgggcgcaggacacggccgatgccaaacgtcgtgtattcgtcgtaacaccgactacaccctacgatgtgggtgacatctggacgcagggcgaaggtggcgacatcatgcgctgtatcgaatcccgtgcaacgggcaatttcgaaagctcggattgggacaaagcatccaaatacaccgatgatacggcagccaacgaagccaaagacgagattgctaatcttcagttcggcgcccgcaactatatagcccgacaattcctctatgcgtggaacagcgccaaagagggtgtttcggacgtggtgacttcgggatcggacgcagacggagcctacatgaagatcgatgccaacaaagcgagcaatgcaggggtagctattgcggctacgagccagatcgtaaactggacggattgcttcgggggtaagatcgcctacaaggccggcatgtcctatgtcttcaaggcacgcatcaaactgccggaaaccaagaccggctgcgtgttctgtgccgtttatgaagacggatacgacattatatcacgcccgccatctgctccatattctgatgtgtatgaagccgtttatacgaccaaatccggaaagtccttgttaaaaatcgtactttacgtcgattattggcgaccgatttacatttacgacatccagctcacggaaggcaacaaggcccccacgggatacatcacggccgaagaggatgtgcaggcgcagatcgagcaggtgaagctggatgtggactacattgcctcggattcgagcctgacgccatccgacaaacagcaggtggctaatgaatgggtgcggattcaaggcgaatactggagcatcatggcgaatgccgaaaagtatgatgtccccacggattcatttacggtctatttccaggcactcgaagattatctcacgcccctgctggccgatatgagtacgacatccgagataaccggcaccgagttcagaaaagtattctccgattattatgaaataagcagcaacatgtcggacttgatcgacgacgcgatagacgaatccatcaaatcgacagagtacctcaagaaggctatggaagacggaagtaccgaggtgaaaggcggtctgataatgaccaatgtgatgttgctgaaaaatgctgaaggcgacgtgacggccggcgtgagcggcttgcaggaagacgatgtgcccttctggtcgggagccgactacacaaaccggaaaaaagccgtgttcagagtacacgccgacggggaagtacacgcaaccaaaggaaccgtcggaatcctgcaggtcaaaaacgattccgtagaggtgagcgatgcggccgcaagcggagataaaatcatactcaccccatacagaattacgtccatatcgcaggttctgggtgctgtgagtgtaccgggtgtcatagaaacgaaagaagtgagcgcactggctacgggacaaagcaatccttttgtccgaaatgtttacgagtcaagtccgccgtttacctgtgggcagggagtacagatgtcagcccggattacagcccgcatcacaggcaatgccgaaggaggtggcgggggcgtaaagatcgaggtggtaaacgctttgacggggaaagccgatcccctgtaccgaaacagcacggctgaagcccaaaacacgaatttgaatatcgacgagacgatttcatatcttttcactggagcagcccagaagtactacatccggattacggtcgaagcatcggcagccggaaaacttacggcctctgcaacgatgaatgccgcccaattcaacttcgtgaaagacatccgcaagaacctgatcgctcccaacggagtagccgttgtgaaaggatcgagcaactatgcggtattcacgggagatattttcgaagtcctgatcggaaaagccggattacgtattcaaaacgggtatgtctataagagagataccgaccatacgacctggacaaagatttgagaaccgccattggagacagtcgtaaattaattgaagaatttttaatggctgcgatggaccatgtatggaatacgtcggttgtcggcagaaaagtgaaagacgaagtagacggtcagcatcgaatctgacaaataaagtccttcgggggaggacacaaaaaatcccccggtttgttagcagtcatctcacctacataccaacaaatgcacgattactcgcagcgaccgggggataaaacctcctgctgcgagtaattttttgtgtcgtttcctgtacaggggacggctggtatgtagatgagatacgcaaagatactaattttaataaaataatccctatgtttacaatcagggtaagccgcgatgatagcggataaatgaaaaagctatcgagattttggttagattaaagctgcaaaacctttactaactaaaacgacgatagccatgagagagcaaagaaacaaaattagtttcagaggacaaaagatttatgtaggaatcgacgtccatttgaagagttggtcggttacggtcttgtccgaaacctccgtattgaagaagtttagccagcatccgagcccagaagcgttgtacggatttttaactcggagttatccgggcgccgagtatcactcggtgtacgaagcgggcttctgcggattttggatacacgagcgtctgacggccttagggatcgacaacatcgtggtcaatccggccgacgtgccgaccaagagcagcgaaaagctgcgtaagaccgacaccgtggacagcggtaagctggcgcggagtttaagagccaacgagctgaaaggcatttatacgccggacagcgtatcgttggagatgcgttccttgataagattgaagaactcgataaccaaagacacgacccgtcagaagaatcggctcaagtctcaacttcggtatttaggcatcgagattccgcaggagtttctcactccgttttccaactggtcgaagcgctttttcgcctggttgaaggagatagagacgctcaccccgagcggccgtcaggccctcgacattcatatccggcatctggaagagttacgccgtcagaaactggagatgacacgggctttacggacattggccaagacggatcgattccgcgaaccgctgcggttgattatgagcgttccggggttcgggcaggctacgggaatggcgttcctctccgagatatgcgacataacccgcttccgcaatgccgaacaactggctgcctatatcggaatgatcccgatgtgccactccagcggagagaaagatgggacgggggatattaccatacgaaaacacgccgttatgcgctgtaacctgatagaagcggcatgggtggcggtacgtcaagaccctgcgatgaacctgttctatacggaacaatgcaaacggatgcccaagagcaaagctatcgtaaaggtcgcccgcaaactggtaaaccgtctattctttgtgctgaaacatcagaccgaatatgtcaatagtatcgtgtcatagagaaacccttccggtaaacggattttcccagagagaatactacatagttgttgcggcgttaacgtccgcttaaaataatctgctcctctggcctttgtaaactaataagggatatgcggcagagagctgaccgctaaggaaaatctgtttatcgaaggattttttcgggttctgaaatctcggctttcgagagagccaaaggtgttaagcacgatgtgcctccgcaccggctcgatcaaaggccggcggaggctctcgtgccttgacctttggccgagaagttcaccaagaaatgcaatacgctgtaaataagataaaaacaaatttaaccgaaaactttgatccaattttatttggattgtaacaggaaagcaaactatgagaacccctatttcctactatggcggcaaacagacaatgctcaagcacattttgcctttgatcccgtcgcataagatctatacagaggcattttgcggcggtgcggccgtcttgttcgccaaacggccctccgaagctgaaatcatcaatgacatcaacatggagttgacaaacttctactggtgtatgcaagtttactattcagacctcaaacacgagattaacaaaacactacacagccgggacctgcacgcccatgccggacatatcaactcttatccgcagttctttactcccgtcgaacgggcatgggccgtatgggtgctctgtaaaatgtcgtttgcgtcaatgatggacgggacatttggatatgacttcagcggcacaatgaccaagaaactgcgtaacgcgaaggatgagttcacagagcggctttgtcagcggctcgaacgagtgactattgagaaccgaaacgctctcgacgtgatcgactgctacgatgctcccgatacctttcatttcgtcgatccgccttatgtgaactccgattgcggacactatgaggatacattcaacgaacagaatatggagcaactcttgcaattgcttgaaaccgtcaagggaaagtttatgctcacgatgttcccgttcgatatgatcgaccggtatgcccggaagaacggatggattatccatcgtatcgagcggacgatcagtgcctcgaaatcaaatcgccgcagacaagaggagtggatggtctgcaactacgaggaacgggcacaggcatctctgttccagggtgagtatttaggcgaatagatggagctggtattgattcatcttgaaataaaaaaccgttcgagcggcagttaaacgccattcgaacggtatgttttcttgattcgctttacatatttcccgcgatatgtaaacggatcgtgcatttgctttacatatattctgcgcgtgtgcgaaatttcagtcgcttttcgttttggattacttcaaccctctaaaagtcgcatctggttctgaacttcgtcgcatctcgttttgccgattatacgggatcgcggagtgtacacgcaccctccctcccgaaaagaacctacaggtgcagcgaagattacaaccgcagccaagagaaacgccgcccaaagcaaaataaagtttcgtcgcccgaaacaaatccgatataaacgaatacaacctccaaagacaattctacacacgtcgttgaatacccgaaagtccagcccgtttttcgcctccgaccgcaaccgttccgggtccatattacgttcagttcctcaattcctcccctcggaaaacgttcttcatcagcaagggggggggaaaatgatcgaacagaaaaagcaccgaaccgacagcataaaagaagcccggagcaaattgctccgggcttcttatttcctcgggttctctctttagaagcaataaacgcacgtaataccgaaattacacaatgcccgttcgttgaactcggaatgcgatcccccgtcccaataagcgattccgggaccgaaagccggcgaccagtcgaacgaaagacgtaccggagcccccttgaaggcaatacccagtttggccgagccggccacgcctacataagcgtaatgccctttgccgcccacattgatacctgcaccggcatcgaagaaccaacgacctgccgacggcgtccaatccatattgcaaacattccaattatacaataccgagaaatcggccgtcaccgtaccgccggcattggcccaataagcaccgaaacgggcttccacataattatcgttgctgaatacatactgtccgacagcctggaaaccggatccgatacgaccaccgaccgtccaattctgggcagatgccgaccacgcgagcaagcccattgccaatgtaagtaaaagttttttcatcgtatgaaaatttaaaatgataaaatattatatgtcctatttccgatatataaaggtaataaaaattttccggagtttacccctttctccagaaaatttcaacttttaggccaatgtcgctctcttttcggtcaatcccgtaacttttaccggaacgccccctatttagtcttgtacgagcatttgtaacggcccttcgtcaagctcatcaacttactcttaatcagatttctgcgcaaaggcgacaagcggtccgtgaagacgactccttccagatggtcatattcgtgctggatcacccaggcaggcaacccggtgaactcttcgtcgtgcggctcgaaattctcgtccagataacgcatccggatcgcaagcgaacgccgcacgctctcgtgcaatcccggcagcgaaagacatccctcttcgtagagtttcgtctcctcggaaacttcgtaaatttcgggattgatgaacgcacgccgataatcggccagttcgggatgatcttcgccccaaggcgtgcagtccacgatgaacaggcggatgcttttaccgatctggggagccgcaagccctacgccctcggcctcctcgagcgtgaggaacatatcctcgatcaactttttaacttcgggatagtcgggtccgatctcccggcatttttcgcgcagtaccggcgccccgaaaacaactatcggataaatcataacttttttccatttttaacccggccgcagccggaaaactaacttcggctctccatatatccttgcaggataatggtcgccgatatcttgtccacaagcgccttgtcccggcgggccatcttgcccataccgctctcgagcatcgtgcggtgagcgatgaccgaggtgaaacgctcgtcgtaaaacaccacctccttgtcgggataggccctgcgcaggcgggccgccaacggttccacgtaacgccacgtttcggacggagcgccactcatttgcatcggctttccgatcactatggtcgaaacgtcgttcgccgcgaaatattgcgccaaccagcgttccaaccctttggtttcgacggtttcgagccctccggcaatgatccgcaagggatcgctcacggcgattcccgtgcgcttcgttccataatctatggccaaaatacgtcccacgatcttaccttatccaatagctcgaacaacaccggcccacacaccctcacgaacattcccgatacgaaacacactgtactcgccgtccgacgcacccggcgcgaaacccgcaacagccctgtcagacattcaatttcttgaggaggctgcgcagcgaacactccgcatcgaccagtccgaagagggcatcgatcgccacgcgctcctgctgcatcgtatcgcggtggcgcaccgtcacggtattatcctcgagggtctggccatcgacggtcacgcacagcggcgtaccgatcgcatcctgccggcggtaacgcttgcccaccgaatccttctcgtcatacacgacgttgaaatcatacttcaacagatcgacgatccgctgcgccacttcgggcatgccgtccttcttcaccaaaggcaacacggccaccttcgtcggagcaagagccgccggaatccgcagcacgacgcgctcttcgccgttttcgagcttctcctcggtataagccgccgacatcacctgcaggaacatacgatccacgccgatcgaggtttccacgacgtaaggcacataactttcgcctgtttcggagtcgaaatactggatcttcttgcccgagaatttctggtggttagacaggtcgaaatccgtacgggagtggatgccctccacctccttgaacccgaacgggaaattgtactcgatatcggtcgcggcattggcgtaatgggccagcttgtcgtggtcgtggaaacggtagttatccgccccgaagccgagcgcccgatgccatttcatacgcgtatcgcgccattcggcccaccaccgcatctcctcgcccgggcggacgaagaactgcatctccatctgttcgaactcgcgcatgcggaagatgaactgacgcgccacgatctcgttgcggaacgccttgccgatctgggcgataccgaacggcagcttcatgcggccggtcttctgcacgttcaggaaattgacgaagataccctgcgccgtttcgggccgcaggtaaatcgtattggccccctcggccgtcgaacccatctgggtcgaaaacatcaggttgaactgccgcacctcggtccagttgcgcgtacccgaaatcgggcagacgatctcgcagtcgaggatgatccgccgcagctcttccagatcgttggcgttcaacgcgtcggcaaagcgcttgtgcacggagtcccgcgctgcggcgatctccagcacacggggcgaagtcgagcggtactgctcctcgttgaagttctccttgaagcgcttcttcgccttatcgacctctttctgaatcttgtcgtcctgcttggccagccactcttcgatcaacacgtcggcgcggtaacgcttcttcgaatccttgttgtcgatcaacgggtcgttgaacgccccgacatggcccgaagcctcccacgtgcggggatgcatgaagatcgccgaatcgaggccgacgatgttctcatgaagacgcaccatcgaatcccaccagtaacgcttgatattgttcttcaactcgacgccgttctgcccgtaatcgtacacggcacccagtccgtcgtatatttcgctggaaggaaagatgaagccgtactccttgcagtgggctaccagttttttgaaaagttcttcctgagtcatcgtattttgcatttactattttctgaaaaacaaaagtacaaaataaatgggaatgtaaggtactccgaaccgttttttctatctttacgccaaaattcggaaatatccggagcggaagacaaatacatctgtttcatattcatcgtacccgaacgaataaccatcaaaaaatacacaaatgaaaggattgaaacttcttcttctcacgtttgcaaccctcgcgattacggcttgcagcgacgacacaacggatgaatggcatggagatttcggctccattcaggtccccgatacacgacagctctcccagaagatccccgcaggacaaaccgcagggaattcggaaattttcttttcgacgaacgatgcctggaattccgccatcacggacgaatcccgcgccgaagccccgacgtgggtacgcataaatcccgatcacggagatgcggcaggcgattacgacatccgcgtcgaaacggatcccaacaccgccgaagaatcccgcacggcctttatcgaaatcacctgcggcacgaactcgattctcatcaccatcacccagtcgggaaccgatggagaggataccaatgaaccggacgaacccaacatcggagaacaggttcggtattggcaactgcacaagatcgtcgggcgcgacgcttcgggaagtctgattgctgaaatggaatatacttatgaacttccggcggaattcagcaaggagtgccgtatcacgggtttcaaaatatccgcagcggacaagaacggcacgctccgtcccgtcgaaacatggcagttcacctacgagggagacgattgcatccgattctccttcacccgggaaatcgatggcgagcaaccttatacgcaaactgcagacggaaccctatacggctacttctgcgatgtacgaagcggaggatacgaactcacctcgacactttccggcagtgaaatagaaacgtacggcttcgattgcacatacggcaccggctccttcaactccgacaaactcacctccatatcgcgttacaattccctgactttggaacccatctgcgaaaaatacgaatgggaaaaagatccctggggtccgctggaggcttgggataattgcagtgctgtcatccgaacgctcgagaacgagccaaatacggaaacattccggcaagagtacggttacgactacgatgaaacgacggcttggagcgatttcatctacgaattggaaggcactcccctcctcaacagcgacccggtcctgctgctggttgccgaaccggatatcctgcgcggactgggtttcttcagcagtctcaacaacgatcttttccgaacggtcacgacccgttccgacgacgcggttacgacccagaccttcgaatacacgcgtcagacagtcgcacacgatgctgaaattgcgacaccgctcatcattacccgcacgacccgaagcgacgagcgggagagcgtctgtcgattcgagattcaattccgccgcttcgacctccaaaattagaaattcgtactttgcggccagcctgtgcgcacccggcaacgaaaagcgaggaaaggttcttgccattcctcgcttttcgttaccgatgcccggtccggtcatttcgctcccatctccgggataatcgtccattcgttcgacttgcagtccttatttcagagtttccgatcattcgaaaaaagattcaccttatgctcttcctcaaaaaagaaatacggcacagatcggcaaaaatttcccggcagtctaaacttacgttctcccttcggaagaaaaacctttctacgacaaaacaaagtgaacccggaagacgataatccacagccaactcttcccgcaacgattaaagagtcgcacgcccccgttacgatggtcccgtctcttcctgcccacaacctgcgcaacgatggaccgcagcggcagaacgaaaagctgtctaacatgtccgattttaatgttttcgcccccgtcggagtttattccgccaggggcaattctcaatttcggggatttggcagacagcttcgtcacagccggaactattgcagcaaaccgctctgtcggaaactgtactcaccgccccgtgcgataatcaggtgatcgagcagccgaatatcgaacagcgcggccgcctcggcaattttcttcgtgagaatcttatcctgctcgctgggcaaggcagcaccggaaggatggttgtgaaccaggataatctgcgtggccagcagttcgagggcccgtttgatgaccaaccggtgatccaccaccgtcgcctgcaccccgccctggcttacccgctgccgctcgacgatccggttgcccgtattgaggtacaggcaccagcactcctcgtgcttcatctccgtcagcaggggtctgaatattcggaccacatcgttgctcgaaccgatcggatcggggcccaactccctggcagcaagcaccctccggcccaattcgacagccgcctgaatccgggcagcgcgtttgaggccgatcccggcagccatacgcaaccgcgcgatgtcggcatatcccaatgcagcgagccgcccttcgaaactggacagcagcgccccggcaagccgctccgaatcaccgtcatccagcaacagttctaacaactcctgatcggtcagcgtttcaacgccccgggaaagcagttttacagatgcctcgctcatgacaccccggttcctttcggccggtagagccggtcgattttatccagaatatccccgcacgcttcgtcactcatagcacacgacacggagtgggccgcacattgttcggcctccttcttcgactcgccctgcccatgtcccacacggataccgtcgatcacgaccgtagcgtcgaatatcggatgattcgacgaataattccggccgtgcaccgtttcgaaagcaatggtatgatgcgtcttctgacaccattcgattaaccgacttttgaaatccgtctcctcgtccgtcaggttgtcgagattcaggtaacggtaatatatattgttgataagcaatcgattggcgaactcatatccctgatcgaggtagatcgccccgatcatcgcttcgaaagcatccccgtagatatgtttctggttggtgcttccggtcgggttggcgatcacgtaccggtccaacccgatcgtccgggcgatcgtattgagcgactggcgcgaaacgatcttcgagcgcaactgcgtaagaaatccctcctgccggtcgggaaattcgatataaagatagtccgatgtcacggcttcgatcacggcatcgcccaaaaactcgagccgttcattgttgatctgccgtccgtcggctaaaactaaagaagctgacttgtgaatcaaagccagcttgtaaagttcgatgttgtgcggaacgaatccgaacagctcatcgataattctgtaatactccttatcctgcccgtaatttcttcttacggcacggcgtacgaaattccacacggcacggacgaggtgttaaatcttacggaaaataaccgtcgagttatgaccgccgaaaccgaacgtattgctcatcgcacacttcacatcgcgcttctgcgccttgttgagcgtcagattgagtcgggggtcgatttcgggatcgaggttttcgttgttgatcgtcgggggaatcacaccgttgttgatcgcaaagatgcaggccagcgcctcgacagcaccggcagcacccaacaggtgccccgtcatggatttggtcgatgaaatattgacatcgtagatgtgatcgcccaacacgccgtgcagagctttgagctcgggcagatcgcccgcaggtgtcgaagtgccgtgtacgttcacatagtcgatatcttcgggtttgatacccgcatccttgatcgcgtcgcgcatggatttcatggcgcctttgccttcgggatggggagcggtaaaatgatatgcgtccgcagaacggccgccgccgaccatttcgcagtaaatcttcgcaccgcgtgccttggcgtgctcgtactcttcgagaatcagcgcaccggcgccttcgccgatgacgaaaccgtcacgatccttatcgaacggacgcgaagcgtgcaccggatcgtcgttgcgcgtcgagagagcctgcatggagttgaaaccgcccacgctgggttcattgacggcagcctccgaaccgccggcgaccatcacgtcggccacaccgaaacggatggcgttgaacgaatcgatcagaccgtgattcgacgaagcgcacgccgaaaccgtacagtagttggggcccatgaaaccatatttgatggagatgtagcccgccgcgatgtcggcgatcatgcgcggaataaagaatgggctaaaccgaggagttccatctcctgcggcgtagcccaaacactcatcgaagaacgtcttaagtcctccgataccggaactccagatcacgccgatctgctccaggtcctccttctcgagatcgagtcccgaatcctcgacagcctgcgtggccgcgatgagggcatactgagtgaagaggtcgtatttacgcacctccttacggtcgaaatgctgcgtccagtcgtaattttttacttcacaagcgaacttcgtcttaaatttctcggcatcaaaatgagtaatcggcgcggcgccgctaactcctttttcgagattggaaaaaaactctgcaatattattgccgagcgggttgatggtaccgatacccgtcacgactactcgtctttctgtcataaatttaaggctttaaggtttgccggttggaaaaatcgtaaattatttcttgtgtgcctcgatataggagatagcgtcgccaacggtagcgatcttctctgcatcctcgtcagggatctggatatcgaaagccttctcaaattccatgatcagctcaacggtgtcgagtgaatcggctcccaggtggttggtgaagctcgcttccggagtaacctcagactctttaacacccaatttgtcaacgatgatctcgacaacttttgactgtacttctgacataattttaattttttagttaaacaatcatttattaaaaattgaaattctttctatcaaacaatcgcacaaaaataacactttttttattacttttgacattacaaccaaagaaattgccgttcttcggtcgcgcattcaatataacacaatataaatcaatactttatgaaactactgttaatttccaactccacgaacgccggagaaccctatctgaaatacccgatgccccgcatcgacgagttcctcggaagtgtccgcgaagtggttttcgtcccttatgcaggcatcaccttttcctacgccgaatacgaagcgaaagtgcaggcccgttttgcggaatacggcatcaaggtacgttccgtacaccgttcgaaagatccccggcgtatgatccgcgaggcacaggccatctgcgtaggcggcggcaacaccttcgccctgaccaagaaaatgcaggagcaggggctgttgaaagccatcctcggcaagatcaaggccggcacgccctacatcggctggtcggccggcagcaacgtctgctgcccgacgatctgcaccaccaacgacatgcccatcgtcgaaccggaatcgttcaaggctatcggggccgtgaagttccagatcaacccccactacctggacgccaaccccgaaggtcacgccggagagacccgcgagcagcgtattctggagtacatcacggccaatccgcgccgctacgtcgtcggcctgcgcgaaggctgcatgcttcattatgaaaacggaaaactggaactgatcggcagccgtccgatgcgtattttcaagaagggcatcgccccctacgaggtgaaagccggggacgacctgtcattcctattataattatggtatgccccgtattttccgcaatccctgacaaaccgtattcgcaagtatggaattaatgaccgctctcaaccgactgcacggcggcaagaacatcaagctgccctacttcatcgcccagctatcccgttatgccgtaccgaaggtgctcctccgcagccggttggaagagattctgcgcgacggagagaaacgttatgacatggactatgtgctcgaccgcgtcaattactacaaccgtttgaccggcgcagagcgcctctctccgaccgaagcgacacccctgaaagaacacaagttcaggggccggcacagcgcctatattttcgactcctaccaaaccacccgttttttcgacgattccctgcgttggcagacctatttcggcgacggagttttcgacctgcttcatccgacgatcatcaaggctcgaaaaatcgaccgggggggggagaagccgcttccggcaaaggagataactccgtattgctcaacttggaccgctgccgcttagatatccggctgcacgacaaaattccgtttacggagaaagccgaccgggtgattttccggggatcggtcaagagcagcgagcagcgtcggcgcttcatcgaaacattccgggacaatccccgcatcgacacggcggatacccgcagcggacacagcgcccaggaaacaggtacagcaaaacaaatcacgctctacgcccacctcgattcgaagttcatcatgacgttcgaaggcaacgacatcgccagcaacatccggtgggtcatgtccaccaattcgatcgccgtgatgccccggcctcgcaacgaatcctggttcatggaaggacgcctgcgccccggctaccactacatcgaagtgagggacgactactccgacctggaggagaagatcgattactacatcgcgcaccccgaacaggcccaacagatcatcgaccatgcgaacgacttcgcacgacaattctacgacagtcgccgggaacggttcatttcgctgctggtcatgaaaaaatatttcgaaaagacaggacaacttccaccgacaaaccgatgaccacgacacagcataccgggcggcagggcgaagaggctgccgcccggtggcttctcgaccacggattcaccctgctccaccgcaactggcggcaaggacattacgagctggacatcgtcgctgccagaaaaggcaccctccacttcatcgaggtcaagacacgccggcgggacggcctcaccccgccggaacaggcactcgactcgcacaagcgccgggcactcgtccgggccgcaaatgcttatctgacagaaaatccgttcgcaggagaggtgcaattcgacctgatcgcagtcgaaaccgcccccgcaggcacaccggaggtgcgctatatcgaagacgccatcgaactccactggtaatttggcagttctgacaatttatcttatctttgcatccgcgatataaagacgcacaaaacgaaagcggatgtggatctataatttggggctggtactctacgtttgggccattgcattggcctcaccctggcaccgaaaggcgaaactctggatcgacggccggaaaggactcttccgccgcatgaaagagagcatcgacccctcggctcgcattatctggatacatgccgcctccctgggcgaattcgaacagggccgtcccctgatcgaaaaaatccgcaaggaacatcccgaatacaaaatcctgctcacgtttttctccccttcgggctacgaaatccgcaaaaattacgatcaggccgactacatcttctacctgccgatcgacacaccgcgcaaagcccgccgttttctggacatcgcccaccccgaaatcgccatcttcgtcaaatacgaattctggatcaacctgctcaccgagctgcgccgccgctcgatccgcagctacatcgtatcggccatcttccgccgcaactcgatcttcttccgcccctacggaggctattggcgcatggcactcgaaagtttcgacacgatcttcgttcagaacaacgattccaaaaaattactggcagaactgggcttcgacaacgtcgtagtcgccggagacacccgcttcgaccgggttgccgaaattgcggctgcggcgaaaaaaatcgacctcatcgaacggttcaaaggcggcacccgtctgttgatcgccggctcgacctggggaccggacgaagaccttctgatccgcctgataaacgataacccctcggtcaaattcatcgtggcacctcacgaaatggacgaaagccgcatcaaccgcctgctcgctgaaaccctcggaggagctgtccgctatacgcaatgcaccgccgaaacatcgttcgatggcaaacaactgctcgttctcgatacggtaggtattctctcctcggcctacggctatgccgaatggggttatatcggcggcggattcggcgtaggcatccacaacacgctcgaagccgccacgttcggtctgccgatcgctttcggccccaactacgaaaaattcaaggaagcccgcgacctggtaacgctcggagcggcaacgcccatccactcatacgaagaattgaaaacctggttcacccccttgcgcgacgacgagcatctgcttcaacaatgcagccgcatcgccaaagactacacgacggcccaccaaggggcgacgaacatcgtcctgcataccgttttcggaaaaccggaataggttcttcgttcagaccggtcgttccgcacccctttcccgacaataccggtttcgggattcgccctgttccgcacatattccgatcgaacggataaacgctccgcaccgtctttactttctgtacaaaaaaagcgcaccggccgcaaggcaggcacgcttgttatttttcgagggggctatttcgaagtcatgatcttcaggatcagatgatccgtttcgttcatgccgtcccgtccgatcagcgtcaggttgcggatcgacttatcgacatcgtcgtcgataatgccctcgaccgacgaaaccgaatggttctccatagccagcatcgccgaaagcacagccgtcgaaactcccgtcatcaacttgagcgaacagctcggcttcgcaccgtcgcacatcatacccgtcaggttggcgatcatattcttcacggcaaaggaaacggcctcgtacccgccgcccatcaggtaggtgatgccgcaactcgaaccggtcgccgccacgacacaaccgcacaaggccgaaagacgtcccaggctctgcttgatatagatagcggtcagatggctcaaaacgagcgcacgcaccagatgttcctcgtccgccttgatctcctcggcataaacgaccacaggcaacgtagtcgcgatgccctggttgccgctgcccgaattactcatcaccggaaccatggctcccgccatgcgggcgtcgcaggccgcgcaagtataggagagaatgcgggagagggcacaatccccgataatccgcaattcgggagcatggcgcaaagtatttcccacgcaatgcccgtagttgttcttgaacgaatcctctgccgcagccttattcaatcgcttggcttccagaatgaagcggatttcatccagcggtgtggtcatggcgaagtcaaacactttgcgcaggttgagttcgacgccctgcgcctcctgttcgctgccggaggtacgacgactctcctgaagcgtttcgccgtcccgtgaaatgaagacgaaattcgtatgcccgccggcgatgatcgccacagcggagtgtccgccgcccgaaacttcgatctcgatatagagtttctcggtaatgccctctttcagggagatgtcgatccgcccctgctcgataaagcgcttaccccgttcgacggccttcgcatccgaatccttcagcacttcgagctgatactccgaccgtccgaccaaagcgcccaaagcgatcgcgatcggcaatccgatcatgcccgttccgggaattcccactcccatcgcatttttcagtatgttggcactcaaccgggccgaaaccttttccggttccgtccccagtatctcgcgggccttggccacgcacaacgcaacggcaatgggttccgtgcagccgatcgccggaacgacctctcgttttatcagagcaattatctgctcccgttcgggttttgaaagcataaaatcgtcgttatttacaatacaaagacagcgcacatcgaacgtaatgccgaatttttcgaactacgccgaacagctggccgcccatacgaaaattttccacggcaaagatacgaataagccgagtgcaaaagcaaattttatttgcattttgcccagacggagtatccaaaatgaagtcaaagatacgaaaattcccctttcatttgtcaggaaaaagcgacgatagcacggttcgtccgaaaaatccacccggtaccggacctgcagtctgttcgctcctgacaaaacgcagcgaggagcctcccgtttccgggaactcctcgccgatactctttccgaaaatactaccggccaaccgtctgagcgagaatcacacagtattgtgcgggatcgagccccagcaactccaacagcgcctcttccttgaagctgccccgtgtaatggtcttcagaccgtttccggcggcatagaggttcacgttctccgtatatccgcctgcatcggccgcgcaccagaaacggatgcggtccaccggctgattccgctccgcataaacgctgtaatcggccacatacaccaaattgagcggcgcagtgtaagcgaaatcctgcatcgcggtaagctcccgacgatctccttcgacgacccggttcaatacattcgctttcgaatcgtaacgatacacaccttcaggcaggaaagcatagacccgaatgggatagagcgccatagccgaaggcgcggtaagatgcccatcctcccggtttaccccggcagcagcccacagtacacccgaaagttcctccagagagagcatctccggcgaaaaatcgcgcgacgaactacgcgccgcaagcgcttcgttgatagtcagtcccatcttgggatccggcgtcttcaattcgatccgttctcccatttcgacgggcgtacggacactctgcttcactccggtaccgcaggctgtcaatgcaaccagcgcacacatcatcaaactgcttgttttcataatctttacggtttttacaaaaataaccaaaatccagaatttccggtatcctggccggaaaaattttccgatattccggcctgccgttcctgaaatgaaagtctgagatggaaaatattcggtcgtttttttggttttcaggaaataatatctatctttgcaccacgattcgaaacccacacgagtttcagtcgatgatggtgccatagctcagatggtagagcaaaggactgaaaatccttgtgtccctggttcgattcccggtggcaccacagaatgagagagagttgcagcaatgcaactctttttttataacattgtgtatttgcagcaaaacggtcggcaggaatagcaccccggactatgccgccggacagacgattcgcccccgcaagcgtttcccggccttccgctccggttcccggaaaaaatacgaagggaagaccggaatcggattaaatgattatttttgcatcggaacaaatcgccgcaagcatgaaaaaacgctggatcgtcttcaccgtattacttatcgtcgccctgaccgcattcctctacatccgcttcttcttcgtcttcggcgagggcgtcaaaagcggagagttgaactatgtcgtctataaagggctcgtcttcaaaacctacgaaggcaagctgatccaatccggcatacggtccaaaacggccggtacgatccaatcctacgaattcgaattttccgtcgaaaacgaagcgctcgcccgcaagctgatgctgctgggcggcaaaaacatcgaactccactacaaggagtatttcggagcgcttccctggcggggattctcgaaattcgtggtcgatagtatcgtcacaaaaccgatcggctccctgccgatcgactccgaaacggaacgataacaaactactccgaagtcgcagcaaacgactccggccatttttcccgaaatattatttcggtccgactacccgaatccgcagacagtccccatgttgcatcgtttccgacactccatcgcttcgttctcgcttccgacgcggctcaacaacccattccactacactccacatccgctgtgcgaattagcggcccgggagctgcaagcctacttgtgcgaacggaaagagtggaccgaagaactctctgcgggtaaaatgttcggggtgctggtcgtgaaggattcagccggaactgtaggctttctgaccgcattttcaggtaatctggccggcagcaacagccacgaatatttcgtcccgcccatctacgacatgttgcggcccggtgatctcttccgcaccgaagaggccgccatttcggacctgaaccggcaaatcgaaaccctcgaaacggatgtccgctacaggggacttctccgaaccatagaagaaacggaaacagaagccgcccgggaaatcgcagccgcaaaagcccggatgcgaatcgcaaaaaccgcccgagaagcccgacgcagggagcacccggacgaaaatacgcagacggctttagtccgggaaagccaatacgaaaaagcggagctgcaccggttgaaacagagttggaaaaatcggatcgcatcgcttcacgcgcaacgaacctccatcgcggaacgaatcgaatccctgcgctgcgagcgtaaggcccgttctgcggctcttcaggcaaaactatttcgcaagttccgtctgctcaacgccctcggagagatacgcgatctggcggaaatattcgcaccgactccgcagggtacacccccggccggtgcaggggagtgtgcggcccccaaactgctgcaatacgctttcgaacaccggcttacaccgctggcgatcgccgaattctggtggggagcctcgccgaagggcgaaatccgccgtcacggacactactatcccgcctgccgaggtaaatgcggcccgattctcgcccacatgcttcggggactcgacgtcgagcccgaacccgatcgcgcctgcccgcagtccgccccggagctcctgtacgaagaccgctggatagccgccgtcttcaaacctgccgggatgctctccgttcctggaaaatcggaagctccgtcgatcctcgactgggctcgggagcgttatcccgcagctacgggaccgctcgtcgtccaccgcctcgatatggacacctcgggtgtactgctgctcgccctgaccaaagaagcgcaccaggatctccaggcccaattcaaacaccgaaccgtccgaaaacgctacatcgccctgctggaggggcggataaccccgccgaaaggacgtatcgaactacccctgcgaccggacctccacgaccgtccccgacaggcggtcgatcccctgcacggaaaaccggcgatcacggagtacgaagtgttggaattccggaacggccgcacccgcatcgccttctacccgctgaccggccgcacgcaccagttgcgcgtccatgcggcccatccatcgggactcaatgctccgatcgcgggcgaccgactgtacggaacagccggccggcggttgcttctgcatgccgaacggatcgaattccgccatccggcgaccggcgatcggatagcgatcgaaaaaccggcggatttctaatgtcgcaagaaaaagcggacgcatcacgcagtccgcttttcccaccatttaacttttcattaaccccaccggaactatttcatccggtttatcatttgttacttgtaattcctgactgaagccacgtgcggagcgatcctcatcgtcccggtgtgcacgccctgcgattcgggtgctacgaattcggaaacgggggccgctcccgccttggtgaaggtgtggctctgacgcaacagtacacccggattctcgtccgcagcgacacctacggccagaatcgtatgctccgtatcccatttgcacaggtagagcttgccggtaggacaccacgtaccgccgaccaacaacgtttcgataaccttgtcgtcggaaatcgcactggtcggatcgttcggatcctccgcgatcatcgttccgtaccatgttttcgcattctcggctgtaaaagtcaccatgacataggcctgaccccggcaatccgcatacttctcgttatcgagcgcatagagatcgtcgccgttgaagtatttgtcgatggtcgccgttaccgtcgcattgctcacggctttaggcagcgtcgtaataggatcggagatataaacatccgcttgaggcttgccgaactcgtcgatgctggccacccatacataatatttcgttcccggttcgagcaccttcgtatagctgtaacccgactggccgcacacccgtttattatcgagattgtcgatatcctgtcccacgtactccgtcacataagccttcatatcggccttgtaccgctcgtaatcggcctcggagatcaaatcgaacatgtagggaaccgtatcgtccgaaggcttgatcgatatgttcattccgcgcgaagtaaggtcggaatgggtcaccgtgaactggcacgccgccggatcgatattgggtttgctcgtgcggaacgggaatttctgaatcggagtggtcggagcactggccgcccaaccgaagatcagcacccaatattcggtatcgggcagataaactccttcgttcttgtattcatatacgcccggagcagccatgaaatcgagcatgaagctgtcctccgctatgattgtctggagcaaagcatcgtcgtcgagtccttggtagcggaacgccggacggatggccgaataatacggaaactcgagatcggacggagtaatcgtaaagtccgctccgttataatagcaggtaaactccaccttaaaagtagctcccgcagccagttccttggtcttgaaagtcgttttctcgatcgcggtattcacttcgcccgctgcatcgagccccgcagcaaaagccaggtaatcggtattcggatccagcccctcgaatgcatagttcgattcgccttgagatcccaactttttgagagcctcttcgaccgagccgtaattcttgaccgcttctgccatcatattcttcatatatacggccaaatcgcccgagtggtgctgatcgaggatctgcttggaaagaacgtcgtaatagtaaaccgcatcgttgtccgaaggcaccactttcatattcactccggtcggagtcggctcaccgagcgtaatcttaaaagtcgttcctgtcacaggaggggtttcggtacccttctgatcgactttcaatacggcctgtgccgtcccggccgtcaccgtcaccactgcctggggcttcggttccgaagccgtattctcctcggccgttaccgtgaaatgagtaccatccgactgagcgaccttgcaccaggcctgattcgattccacctgccatgtagcctggtcggtcttgacctcgatcgtcctggtaccgccgacagcttcgaaaaccaggtcggtcgaaggatcgatctgcaacaatgcagtcgcattgtcgtcatcgctacaacttgtcgtaaaccccaacagacaacacaatactacgaagtaaagatttttcatacagtacaattttaaaattaaacctctatcgaaaaaatcaccctgaagtaacttctcctttttcgaaagttaagttaaagaataattcctgaaaagaaaaattttgttcccgttttgaaattacaatgacgacaaaaagaacaaaaaattatccaattcaatctattttttcaccccgacaagcagaaacaggacactctcctatccgttatggatgcaatttagtacctttgttcgccaaaatccggataaatatcctttaatcacagaatccgtccccgatctcttccgctgtccgggaataacacgaaaccgccatgacaacgcttactgaactgcggctgcgcaaccaactgctccttcagccgcctttcgacgctccgcaacaggtcgtggagtggatgggagccgtacaagcccaggactaccgcatggccaaatgggccgtcggctgccgcaccgcatcgaccgatgccacacagatcgaagccgccctgaacaggggcgacatcctgcgcacgcacctgttgcgtccgacgtggcatttcgtttcttcgaaagacctgcgctggatgctctcgctcactgccgaccgcatccgtgccgccaacgactcctacgcccggggcacagacgccgctctcgactccaaatcgattcaccgctacatgaacctgctgcaaaagacgctggaagggaacaaacaccggacgaaagaggaaatcggagaagcgctgaatcagcggggcattccactctcgcaatatgcgctgcggcatctgctgatgcgggccgaaacggacggcatcgtctgcagcggcgccgacaagaaaggcactacgacctacgcccttctcgacgaacgggctccgcgcggcgaagaaccttcccgtgaagaggcattggctcggctggtccgaatctatttccgcagccactcccccgccacgctcgccgatttcacctggtggtcgggactcaccgcgaccgaagcccgccgcgccgtggcgagcatcgccgaagaactcacgaccgaacatttcggcgacagggaatttttcgtattccgcaacgctgcggcagccgctccgtgcgacacgacgcatctgctgcccgcctacgaccaatacctgatcggctacaaggaccgttcggacgtccttgcaaaagagcacacctccaaagccttcaactcccacggaattttccaaccggttatcctttgcgacggacagatcgtcggcaattggaaacgaaccgcaggacgatggaacgtcaccatacaaacgaccttatgggtagataccgtccccgaggcactggatgccgccatcgcacggtaccgttcgttcatcggcggaacaaagtcggaaaacagtccggaggctttgtgaaataatgattacttttgcaggggacatcacgcaagattcctccgaaaacaatgaaagaaaactggaaaccgggaacgctgatctacccgctgccggccgtactggtcagttgcggcgccacccccgacgaatataacctgctgaccgtcgcctggacgggtacggtctgcaccaatcccccgatgtgctacatctcgatccgcccggagcggcactcctacgacatcatccgccgcacgggtgaattcgtcatcaacctcaccaccgaagagctggcacgcgctacggactggtgcggcgtacgttccggccgcgaccacgacaaatttcgggaaacgggacttactccggctccggcgaccgtcgtcaaggctcccgtcgtagccgaagctcccctgtcgatcgaatgccgcgtacgacagatcctaccgctgggatcgcacgacctgtttctggccgaagtggtgaatatccaggccgacagccgctacatcgaccccgaaacgggtaaactggagttgcagaaagcccgccccatcgtctattcgcacggcgaatacttcgcactgggccgtatgctgggctacttcggctggtcggtccgccgcaaaaagagaatcaaacgggagcgacaacccgacaaaatgaaaaaataacccctgcggacggaaaatttccgtccgcttcctatttcggtacagccgtaaacgcctatcttttttccgacaaggctgcggcccactccggctcgcggaatccgaccaaaatcttgtcggaagcaatcagcaaaggccgcttcaccaacataccgtcggtcgaaagcacgcggatcagctcttcgcgcggagccgtgcggaccttttctttcaggttgagcgccttgtaacgcagaccgctggtattgaaaaatctattgaccgcaaggccgctgcgatcgatccactcttcgagctccgcttcggagggattctgctgcacgatatcgcgcacttcgacttcgatcccgcgctcctgcaaccatttaagggctttctgacaagtgctgcaacggggatagcaaataaacaagggtttcattttcatcgtatttaggagtacaaatatagtgaaaaccgagggctgaatcaaatttgcacgaacctacgcttatcttccgtaaagacggcgaaaatcggatacagaccagattcgctccctgtcttcgccgaagcgttcctctccgcattcaataaagtacggcacaagacgaacggcaaatccaacttttccttatctttgtatgaagaataagagtacgtttcggacaagcccaaacgaccgacgctcgaagcatgcgccgaatacactcgtgaactctgccatgcaaagaggaggaaaacagaaagttaagtttggccggccgcttgccttccattatttttgcagaagataggatacgcctcggaaaactgagagtaagctcccgttttcttctcgactttcactatctttgcaaaagatcggaagcggttcgacaatcttcgcgtgcaagtcccgcacgattgctctcacctttccctgtcttggaaaaacggaaccgaagaatttatgctgcaacaaaccatccggagttggatcgaccaactgctcgtttacatcggaatctctgcggacagcgcccgcggcatcgaccaatgggtcatcctggccatcatcgtcgccatcggcgtagggctggacttcctgatccgcctgctgttgttgcaggtcgtgcgacgcgtcgtcaagcagaccaaagtcacgtgggacgacatcatcttcgacgacaaagtcctgcggcggctgtgccacatcgtcaccccgatcctggtggtggtgatgctgcccatcgcctttcccgatcaaaacggcctcgtcgtcctgatcacgcggctggtacagatagcgatcgtcatcgccgtcctgcgcttcgtcaattccctgctggaagccatatttcaactgatgggccgccgggaggagtggaaaggcaagccgctgaagggcttgatgcagaccggacaggtcatcgccttcctggtcgccgtcatcctcgtcttctcgattcttctcgaccgctctccggcgatgttcctcaccggtctgggcgcttcggccgcgatcttcatgctggtcttccgcgacagcatcctgggtttcgtatcgggcatccaactgtcggccaacaacatgctcaaagtcggcgactggatcagcatgcccaagtacggcgccgacggcacggtggaggaggtcacgctcaacacggtcaaagtccgcaactgggacaacacgatcgtcaccctcccgccctacctgctggtgagcgactcgttccaaaactgggaaggaatgcgttcctcgggagggcgccgcgtcaagcgctcgatcaatatcgacatgaccagcatccgtttctgcacacccgaaatgctggagcgatacaagcgcatcgacctgctgaaagattacatcgcccggacccagcagcgggtcgaggagtataaccggcaacacgacatcccctccggtgaagacaaaatcaacggactgcaccaaaccaacatcggagtcttccgaaactacctgaacctctatctcaggcagaacgaacgggtcaatcaaaacatgatggtactcgtccggcaactgcaacccaccgaacaaggcctcccgatggagctttacttcttcaccgacacggtggactgggtcccgtacgaaggcattcaggccgacgtattcgatcacgtgctggccgtcatccccgaattcgacctgcgcgttttccaaaacccttcgggcaacgacctgcggacgctgaccggaaaaaccgataccaaccattaagacgctatgaaaaaactgctgctcgccctcttcctcgttttcacccttataatcggcaaaaccaaatgcgacggaattcagaaccagatgcgacttttcggtggtcgagttagcccaaaacgaaaagcgacgaaaatttcgcacacgcacacaaaaaagcaccgttcgaatggcttttgactgccgctcgaacggtgttctgcatcaagttgaaccaatgccggctccgcctcactcgcctaaatatccaccctcgaacagggacgcctgcgcccgctcctcgtagttgcagaccatccactcctcctgccttcggcgactcgacttcgaggcactgatcgtccgctcgacacggtggataatccatccgttcttctgggcataccggtcgatcatatcgaacgggaacatcgtgagcatgaactttcccttgacggtttcgagcagttgcaggagctgctccatattctgctcgttgaacgtatcctcgtagtggccgcagtctgagttcacatagggcggatcgacgaaatggaaggcatcgggagcgtcgtagcaggcgatcacgtcgagcgcgttgcggttctcgatggtcacccgttcgagtcgctggcagagctgctccgtgaactcatccttcgcattgcgcagctttttgggcatcatgccaccgaagtcgtatccgaacgttccgtccatcatcgaggcgaacgacatcttgcagagcgcccatacagcccacgcccgctcgacgggagtgaagaactgcggataggagttgatgtgcccggcgtgagcgtgcaggtcgcggctgtgcagcgttttgtcgatctcgcatttgaggtcggaataatagacctgcgcgcaccagtagaagttcgtcaactccatattgatgtcgttgatgatctcggcctcggcaggccgtttggcgaacaggacggccgcgccgccgcagaacgcctcggtgtaaatcttatgcgacggaatcagaggcaggatgtgcttgagcatcgtctgtttgccgccatagtaggaaattggggttctcatagtttgcttttctctaaaattttgtacttttgtgtactcttacctacgtgcaaggtttatggcacaaaaaacgcctaaccgcgattgagggtattcccccggtcgtgcggttaggtgcctttgtgttagtacgtaggtaagaggacttgctaacaggccgggggattctttatgcccacccccgaggggcttcatccgtcagactcgatacagaccgaagtcgatttcgtccttcgctttccagccggcggccagcgtaccctgtacgtgcgccattgcggccgtgtaaaagttcttcagttcgtctacggtcgtgaactcccggtataccggcttttcatcggttccgagcttgaatacgaccggaaggttcgcgccgtcggtctgaacggccagatcgaacgcggccttgtagttgaactgattctccgccgagagccacacgggcgtctcttcccagcggaaccccgagcggatcgcttcgtcgatccgggtattgtacgatgccagcaccgcggccttgatctcgtcgagcgtcggccggcggtcgaattccgcctcctcgtaagtggccatgccgtcctgctcctcgatgtcccagcggactctccatttatccttgcgcggattgacgcactcgatgggcgccacgcccgcactgccttgaattctcatgtaaatacgtatttggtcttgttcttgccgaactgctccgccttgatggtcgtctcgaaagggaagccgtccggcatttcgcgtatctgctgaaggatgttcttcatctcttcagaattagtgaagaatttccgcatctcgccgttcatttcgatctgaacgagacaccggtcttcaccctgttcggttttgattccggtttcgaaatcatgcaccacgatgggaagattgaccagttcgcggatggagatcgtcgcgcctttgaagcgcttcttgccatcggccggcgtgtacgtaacgcctaaatccttgaagtttttcatatcaatacctgttagtttggagaaaagccttctgcaatcggcgtgtttggccatcccgtagaaggatgccgtcagttcacgcctgcgtcgtctgctctcgacctcgctcatcttccgggcgaaggtctgcttgttgcgcttgcgcagccgcacatggtcgggatagatcacgtagccgaggaagtcgataccctcctcgacgggagtgatccggtcgttgggtttcacttccagcccgatggcttcgacgcatcgatgcaccgcatcgcgcacggcccacaactccgctttcgaggcggccagcacgcggccgtcgtcgcagtagcgatagtagtagcggacgccgaggcgatccttgagttcgtggtcgaggtagatcgagaggattaagttggccaacccttgcgaggagcgcagccccatgctcaacccgtgcggcatcatgtggatgaagccgtcgagtatcgtcagcagccgttcgtctttgaacacccgccggacggcggcaatggcgacctgctgatcgacgctttcgtagaatttacggatgtcgaaggtatagcagtaacgggttccgtcggggtcttgagcgatatcgcgccggatatactccatcaggtcgtgcatcccgcggttgcggatcgatgctgcggtcgtccggatgaaccgccggtgcagatgctcgtccacgactcgcataaccgcatttacggcgatgcgatccttcaatgggatcacctgtatcgtccggcgttttcccgcctccatgacgatcatctcccgataaccgcccacacggtacgagccgtcggctatccgctgctgcagctccgcgatcacctcgtcctcatgcgcgagcaggtaacgtccgacccgactgcgtttgcggtctgtaccgcgcaacacggatcggaacgatgccttcatgttgtccgtagcgacaatctcctcgatgatgtacccatccctgcgcatgttaccttcaattctgcgggcctgacctcttcgagaatccctgcggaaacctaccaagctccacccaacgctgtatgtttcgcctttccggccataggccgctgctggcgaggctcctccccctcggcgctgcggtgggaacacgttcccggtgcagtaggccgacatgcattcttgcgttctcctcattgtttgcgagccgagagccgatgtgcgcgttcgtgctcgacgaatcgtagtacgtgtacgcgcacgacacgccgccattcgcgtacgcattgctgcacgaccgatagaccacccggcgcgtagagctggacacgttttgccagtcgcagtaatgggaggtttccgaaccgccgccgcgggcgacgatcaagtccatatggcgaccgaagaccatattggctggccaatattccgcaaatgcggcgataccctgcacttcgcgcggggcgcgcccgggcgtctcgatactccagcggccgtcggccttctccttgttaagcgttacgccttccagccattcgcatttgtcgccctgccagcattcgtagcccagcacgttcgtcgaataggcatctttcagcgtctcaccctcgtagtaataggcgccggtggtcttaccctcggggttgatcgtatcccgcatgccgagcatattcgtcagaccgctgcgcttgttatacgaactctgaccgtagccgcactgcccttgcgaatcgcgcgtgccgtattttgcgtagaacaggttcgcgacggcgcagtgcatgtcccagtcgatgagctggaaccccgggccggagttcgcggcgtagactttcagatcggcctgcgagaccgtgccggtgctgatctcgcccgagatggacttcatgaagtcgtcctgcagcagcgcctcgtagacggcgcacaggaactcgtcgtcctccacccagtccggctcgatggcctcgatcttatcgctcgtagtcagcagcacgtagtcgaaatccgctgccgtgacgatggtgaaagcgagccgctcggcgccttccggaaccgtggcgaacaggtacatgccattcaggatacccgcgctcgaagtcgcgcgcaggcgcccgaggatcgtccccgcggcatccagccacacagcgccgtaggccgccgaagccatcgacgggaagcgcacctgacggtagccggccaccggaaccgtgcagtaggagttcgcggcgatggtcgtcacagcctcgtccagcgtcgtgtactcctcggcgatgcggatggccttgcccgcgaccacctcgacctgctccttcgtgagtttcacgtacacgccgtccacggccgggcattcggcatccgaactgaaaaaggcgtatttcttctggttcagcaggtcgttgacacccttgcaccagtagtgcggctcgtacatccacacgttgccgtcgcggcccgtcagtaccgccggcgtggccagcgatacgtcatccgcatcggcgtagtagttcgagttcccgtcgtgcagcgggaagatcgtaacctctcctgcggcggtcttcttgcccagacagcgatggcgctgcgcgaggatgcgagcaatatgtccgctcggaacgtacggcgtatcgaaccggtagcccgtccggttgtcgaggttcgagatgttcgcaggatcggagaccgcatcgtcgaactcgatgcacgtccacgccggctgttcgatcgtcaactccgggaagtgcgtctgcatggccgcaagctcctcctcgtccatgtactgcgtcaggcggcagcggcccacaagccggcacgtcggcgtattgccgccctgctcgtccacgccgcccatcgatgcgaggctccgaagcagcgatccgtcgtcctcgatgtcgacgcccgtcacgcgcaggtactgcactgccgggcagcgggccagcagctcctgccagtcgatcagagcacagccgtcgatcaccagacgcgcgatcgatgccgtgccctgaagcgtcagccccgtattcgggaggctgttcaggccgaccagttccagcgactgcaacgtcgccggaagcgtcgctgtcgtaagcggagcacccgcagcgaaggcgacgctccgcagcgaggtgttacgcgccacgagcgactctaatttcaggttgttcgacaggtcgagcgacgtgaagctgctcgatttcagtcccgaaacgttcagcgtccgcaggtgcaggcagttcgtgacgatgagcgcggcgagcgtcgtctggctctgcgcgcagctcacgttcaaagtccgcagcgccgtgcagttgttcaggttgagcgtctgcagcagcgccatcgaaacccccgacaggtcgaggccctgcatccggctcgcgccgtagaagtactgcgggtcgttgacgatcaagtccgcgtccatcgtcagctcgaccgtactgcccgcatcggccgcgagcaccgccgactgtttcggcgtgccgctcgtgtagccgtaaccgaaatagtagcgctccgacgccgtgatccgaatcttccgcttgtcctccgagaacttgtagccgaagtaggccgcgaagctgtcggcgcggtacgtaccggcgacgtactgcgcgtcgagcagcgcgaagcggttgcggatcgtatagacgcggtgcgcatagcggctgccctgcaaggcgtacaagtagtcgtaatgcttccgaccctcggaggtcaggacaccctccgttaacggctggatgtacttgaagtggccgtccttgttgtagacacgctccgaccagttgcccatctgctcctcgttgaacgtccgcagcacatcgtccgtgctcatgttcgaccgcagcgcacccgccacctcgatgagcttcgcgcccagaccctcgcgcaccaacttccacagaacgctgtcgtggcctgcgaaagcgtaagagccgatgctgtcatcgaacgtctcgtgcgtgatcgtatagaggtacgcgagcagcgagtcgttgcgcccgccgaggatcgtatcgaggtcgtacggcagcggatgccagacaagaccgtcccatgtggcgaacatcatgttcttcgcacggttgtcgacggccatcaggtagtccgtgaaaagataccacgcgcagaggaactcgacgtcgaaatactgatctacctccgcggcgaagcgtgcagcatcattttcgcagcccttcacccacgaccagaggcgctgcacggcagccttgtcgtcggcatgcgccgtcgcccacgtctgatccggcttgtagcggaactccagcgcatcgtcgaaggacgtcatgtcgtccgtggcgaacaggcacagcggagccgagttgttcaggaactccagacacaggcacttgttgcgctccccgcccagcgtcgcggcatcgttgaagccctcgatcccctcgaagccgtacacgtcgtggctctccgacttctcgttgttgaagttgaacttgcccagatagcgtatcgtgccgctgccgtcgttgtcgtagaacccgtcgcaggggaagccgtcgacgccgatgcgcacatcgtatgcacctgtgtaggctcgctgcgggggcgtgagatagccgcacttgcggtaggtgtcggcgatgagccgcacggcgcccgtgttatgcgtcgacgaggagtccgagaagtcggccttcaggcagaagatcgacaccggacgcgcacccggcttgaacgagtatttcaaatcggggacatcggcgccgttcacctccagcgtcgtgccgtacttctcccgccggtcgaaatagaggcggtagttcttccgcgggtaggtcgtcgaggaggttccctgaatgcgcaggccgatattgcgggccacgaagtcgtactccttgccgtaggccgagtagaagtagagatcgaccggaacctcgaacttcttgttgttcgtctcgttgaccagctccacgtcgccgacgatgcggaacaccgacttgccctgcgcgcggagcttctcgatgccgatatcgtcgccctcgtcgtccagcacatcgttctggcggtaaaggtgcaccatctcctcggtcgtcagccggtcgacgatgtagttcgacagcatctcgtcgtccgacagggcacggtcgtagacccgcagcatccgcagatcgacatcggcagccgcggaaccgatgctaatacccgccggcgccgcctgcagcaggctctccgtcgaggcgtactgcttggcgccgcaacgcacgccgttgacgtacagctccagcagccggtggccggacttcgcacctacgacgaagccgatcttcaggtcgatgtccggggcgaacttcgtacctacctgcgtacctcccgaggccgtcagcagcgcctcctgcgccgtgaggcggaagccgataccctccgcaaggcacgagagcacctcgccgtcacgatccgtgacattcgagcagcgcagctcgaactcgtaggtagcgcccgtcgacgtcgcgtccgcggcgaacggctgcatcccgatctccacgcgggcgccgttgcgcatccgcagcacatcgcccgtccagccgctgctgctccaatcgaagccctcgaacgtgctctgcacatcgccgtagctccacgtcgcaggatcggcctcggcattcgaacggcccgcggccgagagccgcagccgaaggtctgccgtcgtctcctcgatgtcgatatccgaaggctctacggtcacgggaagaacgtactcgacgccccggcagaggaagcgcaacgtgaccgcaccctgtgcggagaagcggttggcgtagcgctgcgtcgtgcgcggaacgctcacgtcctgcgtcagagtgtcattctcgaagatcgagaccgccgccggggtctgcgccggatcgtaggccacgaaatcgaaggcgagttgctcgtagcggcccacgctcaggcgaggcgacaggtgctcgtcggtgaagatgcggccgtcggcgaagcggtgcatcgtaccgatgaacgcaccgcctgcaccgcgccgcagcaggtcgaggtagacgctctccgaacgcagcgacgactcgtcgctcacagcgacctccgcgaccatttggacggtatgccggccggcagaaaggcccgacatcggaagcgagaagctcccgttcgtcgtgcccgacttggtgaccgtcgccgtatcgtactggcggccgtccacgtagagcgtgacgaccttcgtacccgaaccgctcaccgtgaaggggatcacggccgtatcctccgctccgtagccgcccgcagcgagtcccgccgcgaggttgtagctgctcgaaagcgacagcgcgacaacgcgtaccgagacgtatgcctgcttcgactgctggcggcccgtctccgggtcggtcgtcgtggcgcgcacgtagatgtccgtaacgccggcctgcaggtagggcgtaaggtcgagcgtatagctgcccttcgatacatcctgaaccgtttccccgaacgcctcgaccgaaccgcgcgaggccgtgatccgaatcgtcgccttctggcccgtggtggttccggcatcgtcgccggcagcgtactggtggtcgtaggtataggtcagacgcaccgagccgccctccttgacgacggggtgatcgacgccggccgagagcacgatcttcgtcgtgacgctctcgccgccaccaccaccgcccgcagggatgtcgacaccggcgatctccgcacccgacttattcgtgagcgacaaacgcacgctcgactcgtcgtcgttcagatcggccgtcatgccgaacaccgtactggcgtcgatctcgttcagacggcgcgcgacggcggcattctccacagggttcgtggactccgcatccagcgagtcgtcgaccgtcggcacagggatatcgacgttgccgtcgccgtcgggctgcatcttccctccgccgttcaccgtaacgctccttacgccgctgccgaactcccgccattgtgccgtgtcgttccagccgtccagcgtggcgccgatgaactggtagctctgccattcgccatcgctgacggcgaacgtcaggacaagaccgcgcgcctgccctttctcccgcgccacggcagcaagggccgtcgcaagcgtgtagtaaccgctatccagaggaagcagcgcggtcacgttgtacacgtttcctgcgcccgagccgctgccgaagccttgccagagcgcctcctgcgtccagtcgtcgagcgtcgccccgatgaactgccgcgtctcccatttggccgcatcgatgcggtaggtgacgacaagccccttcttccggtaggtgacgccgtcgttcatctcctgcgctgcgagcgcctgcagcgccgtctccaacgtgtaggtcgcatcgccgcagcgcgcattgacgttgaacagcgatgtaccgcccagagccgtctcggcgacggcattgaactccgcgacgataccctcggcggcggccgtggcactcttcgtctgggccgtggccgcggccatctctttggccagctcccgcgtgacgtccgcgacatcctccgtttcggccgtggcatccgcggcctccgaagcggctgcaagagccacggcggcggcatcctccgcaggcttcgacagcagcggcaggggtacaagcaccaccttcgtaccctgcatggccggaagcgagttcacgcccgagagcgccgtgaccttctccagttccagaacgccctgcgacgacgctttgatctcgtctaaaatctccttcttgagaagactcttctcttcatccgtgattgccatatcctattccgtttgagggttcccgttgtattctttgacgtgctccgcgaacgcatcgatcagcgcaggagttccgaagcgctcgacggccgtctgaagcatgcgcaggtcgtcgtccgaaaccgacagctcaccttcgctgcggtggatcgtcagagccagattcagcgcctcgatgccgtgcatctggttgtagagcagattggcgacgctccggcgcatgtcgcaacgtacgcgctgccgtttcgagatgtccgtgaagacatcgaattccttgaggttgatttttttcatttttccttaacttgagtggttcaatatctggtagcggaacccgtcgatcttcgtgatcagcacggtgacggaatccccggcttccattccgtaatccacgagcgcctcgttgtggttgtagatgccctgcagggtgatcttcttcgaccccggacggacgcggaacgtcacggtggccgcgaaatcgtccggcagcaccgacagtccgaactgacgggcgacggagagctcgccgggaagttcgacattcgtcccgctgtaattcggatcgttgtagtacatcaggatgacgttgcactgcgagaagtcgaccttgtagctgccgctgtcgaacgtcaggatgctggccttcgtaccaacgaaggagggcgcgatcaacgccgcattgctacagatgccgtagttcttcgtaccgccgctcacgtcgatgaacaggccgtagttcgcggagtcgaagccccattgcgcatccgagttctgcttctggttcacgatgcggccgaccgcactgaaagctccgccggccgaggccgggatcacgtcgttgcccagcatcgcatagcccgaatcgccgcccacgcggaaaaaattctcgtaaatagccaaactgcccccggagccggtctgcgacgcaacggctccgatgcggttccggccgatctcaaagcccccgatagttccactcgtagcctcgatctcgcccttgaagactccgttggcggcctcgatgcttccgtcctccagaatcctgaagttcccgttcgccgtgaccagaccttccaatttgatgctgccggccttgatgaagacaccctctgccgaagctccgacgaacgattgcagcgtgccgtccccggcgatggcatacatcccggcgacatctttgcggctgacgaggcccgtcgtgttgatgaggttcccgtccttgtcgaatgactccgtggcgatcttcaccagcaggtcggtctgctcgaagagcgtcttgtgcgagtagacgaaatcctcgatgtggtcgagcgacagcatcagcatgtagaggtacatcttgccgctgaacgacagtcggaagtcacccgtaccgttccacaggccgctgccctcgaacgtgcggtaaccttcgccggcggcgatatcctgcgtgatgtgaaactcctgaaagttctgaaagcccgtctggtcgacaccctcgaattcgatcaccagcgtccccggctccgtgcatttgtaaaagaacgtgaggaacaccggcttggctttcagcagcccgtccagtcccggctcgtaggccggccgcgtcttgaagtcggcgttcttctggaggatgtagttgttgttgatgcacatcaccgtgcggccgtcgacatactcgacgcctgcatagctgcccttattcgaatagggagcgccgttcacccacagccacttcccgccgagcgtgaagaaggcgatgtcgttgtccgaatcccagtagcgcatgccgctgccgaagttcggattattcaggaagctctggcccgtcgtgaaatcgttgcgcatcgattcgacgctcgaacggatcgtgccctccatcacctcgaacttcgtcaggacatcctcgcccgtggtgagcagaaagcggccgcgcaaataggcattgtccgcatacaggccgtatccgtgcggctggtcgtcggcagggaaccacgaatcggcaatgccgtccagattgcccatgcgggcatgaagacagccggcgagcgtcttgccgctcacgccgttcatcacatcgatgcgcggctgcccgtcgtcggtcgccgagatcaggatcagcccctgacgctgcggatcggacgtgctgcccatcagcacgcactcgtcgccgacggccggcagcgcatctccgaactccgaggcggcgaccctcgccacaccgccctccaccgaggcgatctcgacccagtaggatttcgaagccgcagcgccttcgaccttgcagcggacgaggtcgccggcgacgaacggacaccccatctcgaaggtcagcaggtagtgctgccccgcagcgtccatgtcgacaccggagacctttccgtcagcggccgacacgaccagttcgccgcccaccgagcgaaccttctccacgagcagctccagaacccgcatcgtctggcgaaccgtcaggcgatccacggccagatgcgatatgccgctcgcgtccatctccaactgccaccccgaccctaacaggccgtcgacgaacgacggagatcgcagcaggctgcgcacgacgacagacagcagttccgcattgcccgcagcgtctatctccccgcccgtcgcaccgcttttgaagccgccgaggcgcagaccctgctcgaagatgatcagcccctgcgccgtatcgttctcccgcttattgagaaactccttgcggctgcgcttcgccgagaaaaggttgaagtcgctggccggcgtgttctcccagctccgcacgatatccggaagccccgccgaagccgtcttggcatagtggcgcacctcgcccagctcctcgtcgatcttctccagcgcgcctttgcccagcacgtcgctcacctcgatgtccatctccgaggggtactgcacgttctgcgagatcgaggtgatgcggctcgtccgataacccgtgccggggaagtattcgtcgctctctaaccgcacgcgccgaccgacgtcgagcgcaaggcgccgccgggcgacttcgacataatccgtgcggcccttgtagacgtagcgatcctgatcgtgttcacgcaggtactcgtccacggcctcggcgaactcctgctcggcaagggtgtaatactccttcggcatgcggatattccacaggatgtattcgtcgccgaccttcgggatcagcagcccgcccggcaactgcgtatcgtcgtcgtagggccattgggtgatgatctcgaactccttctttttcgagtcatagttcacctcgaaatcccggccgttcagctcgccgctctggaaggtcatctgcttcacgagaccgccgatctcgtaggcgttcgggtcgaacgtcaggctcgtgtccttgacgtagtagatcgtgaaaggctcgccgtcttcgtccgtatgctgttcgctgcggacgctcgaaagcgtgccgatacgccgcggatagatacccgagaaggcatcgcgctcgtagtgttcgacgatgccctgctgcgtgttttgctccacgtacgtccggcggccgggcagttgcagccggctgtaaccgtactcctccggatcgatgttgcgcgtcgagccgatgggaaacagacgcgtgaagaacttgacgttgtcggcggattcccgctccagcgacacgaggccgttgtcgtagcccagcaccgcctcgtcgccgtattcgcagcggcagaggttcacggtcatgccgtccgtccagaactccgtcttcgcggcctcggccagcatcgagagcgcctcgtcgcaataggttccctcgtagtcgagggtcaggttctccgtcgagagaacctcgccgaccttccagtcggtcgtacccatctgccggttgatattggccacgatgagcgccatatgctcgcgggccggagccgtcagcgaaaagatcggatcgttctccccgtcgactatcttcagcacgagggcctgcctcatgaggctctcgatgccgtagaacttgcaatcgtactcccattcgaccgtcgaggtctgcttcggggcgtactcctccgtaatccagaagcgcacgccctcgaagtccacgtagtcgtagacctcgagcggcacgcattcgaaagccgtgaacgacaggccgagcatgtggtcgcccatcagccgcttctgacgcgtggagttatccgacggcgagaccgtcagcttcagcatgccctttcggttatagattttcagttccatagtttcatgagcagccagcaacatccgtatcccgcagcgatgccgagggcatctgctgacaaatcccaccagcaccaatggttgccggaggcgttcttgtcgccgtactccttacccagagccaaccctgcggccagccagaggccgggagcgcccagcgcgaagacgactgcgaagcagacggcgaaatgcttgatcttatcttttcctatcttcatgttcgaatgccgttcgaacggcgtttgaatggggttaaaacgacggctgcggctcgcgaaacttcaccgtgaacttgccggcgacctcgccctcgaaatccgtcaactgcttatagtccgaagcctcgcggtagaacaggtggaaatggcggttcatctccgggaagtagaaatcaagccacccctcctcgcctgtctggagcatctcgacgaaggccgtatagcgcgacaggaactcctccctgtcggcggccaagatggcgaactgcagcgatacgtcacgggcctcgcggcgctgcacgatagtcgagggaaccgtcacgccgtgacgttcccgcagcgacacctccttctgcgccttgaccgcagctggtctgagcagcgacgagtagttcttcatgtcgccgggcttgtcctccgcgaggaatgctccgtaggcatcgaacgggtcgatgtcgttgatcagcaaaagtcctttcagtacatccatatcgctatttcgctttcaaaccgtcccgcttgatggcctgccacaaggccaatatctgtggcaacgtatcggtatttttcgctattctgttcagcgcatcgagcgaggcgcccagaccttcggcgatgtcatccatcttgtcgtcgacgctcgcgccgtgcatttgaagcgacgtcatcagcccttcgagcttcgtgccctgatcctgcgtcatggtggtcgtgaaggctccggccttgccgctctgcgtcgtgctgtcgggtttccacagctcgtaacccatctcctcggcgcgcttcgcgaactcctccatccacgcctcggcagcatccatattcgaacctatgcccgagtagaagtcgtcgagcagttccatcacgtcataggcgatgtcctcctcgctcttgccgctcgcgtagatcgactttaggttgtcctgcaacttgtcgaacttgtcggcgaagaacagcgagtagacgacctgctcggccagctcctcgagcttggacgagatgtcgtcgcacatgtcgccgtagacccccgtgacacctttggccatgtcccggacacgatccagcacgctgtcgcccagcgacccgaaggtcgaggacaggtagtcttccaacgcctgctccgcctcgtccatcgcatccttcaactcgatgagattctccagatacttgcgcgtctcgtccgacatcttccgcgtgtcgagaatcgtctggagcatcgcagtatccagttcgccgttggcgtcgatcagctccggatagaccgaaagaatactgctgtacaaatccttgcctttgccccagccgaacagacccgtcttcttgtgtcccgtgacgatctgcgccgaagcgagtccgtagatgccctccttgtactgcgccatgcgcgctgcgtacgttccgcgggcgtcgcccgtgatacgttcgaaccagttcatcgtaggggccgaacccttcatctcggcctcgaactgcgaaagagcatccttgtagacctgcatggcgttggccgccttcatgatctgacgctccccgaagacactcgtcgcctcctccagcagcaggttctgctccagcagcgcgaggttgtactgccgctggaagtcgagcttcgcacgctcgatctccttcagcgcctcccgatgccgggcttcggcggcgaaggcttgcccgatgaaattggccgcttcgccgatggcggctccgatacctcccacgatgccgcctttggcgaacccctgaccgatgttcgacacggcgctcatgacctgctgcacgccactgatggcatccgcggtctgggtgtcgcccatctggtcgaacatcgcggcgagttctcccgcggcgtccgctgcggcgctgccgatggttccgatagctccggagatatccttgatcccgttcgcacccttgagttcggccagacccttctcgaaagtcttgaagatattttcccacttgttggaaccgctcttcttgcccgtctggagcagcttgtcgagcgccttgcgcagcttatccagctccgcaggactcttctcgatattcttcagctctgcagcggagatgaaggtgatgccctccgcagaccccttgccgttcagatatgcccgcagctgcttcgcctgtgcgatcagctcgcgcagcttgtcgaacgacagcgacgagtaatcgccgaagagctgcttgaggaatccgttgtctttggagatgctcgcagcctcggcgtcgttcaccgagcggatgccctcctcgatcttctgacgcgcaacggcgatggcccggtcgatctgctccgaattggcctccgtgcgctgctcttcaagcgcggcgatatcctcgttgccctgacgcctgatctccgcacgctgtgtctcgaaatcccggtatttcgcaagaaggcccgacagatcggccagctcccggttcttcgtatcttcggcgaccttgagcgcgcggcggatacgcgcatcggaggcagcattgccctccgtgtcctgtttgagcgcgtagtacttctcctgcagcagatgcaatgcctcgcccgccgtaccgtccggatcgacatcgacggcgatcaccagacccagcgtatcggctttcagaatgtcctcggcgccgttcagcgactcgtcgatatacgcattcagttcctcttccgaaaggacatcgccgttggggagaatcggcgtgatgagaatctcgtggcgcttgccggccgcgtcatcgatgccgaactgggaactgaacaccgtagctatgccctcgccggcatcctgccaccccttctccgccagacgcgccgcgtcgatcatcggccgagccagcagatcgacattgccgacgaaacgatccgtcatctgctttcccaacgctgccagacgctcgtcgctcagatggcttcgcagcgcggcgatggccttgtcgtgcttgcgctcggcatcctcgcgctccgcagcgtaatccttgtaggttttgagtaggttctcgaggtgatccgcatccgccttctcttctttcttgtcgatctcggtcagcgtatggtcgagtttccgggccgcctgcacacgctgcgcggcggcttgggcgaggatcgtacttttctgtcccggcgtaaccttcccgccggccttgcgcagacgctcgtaaagctgaagccgctcctgctcctctttggcaatacgagctttctcctgctcgaaagcgttttgcgcctcggcgcgctccttctcgaagccctccttcatcagcgaaatgcgcgtatcctcgatgcgccggcgggctttcgtctcgtaatccacgaggttctgcgtgagcttggacacatcgccggagccgtccttcggaggcgcgatgaatccgccgaggccggactccttacccagatcggcgatgtcctccaccagcttcttcgcctcgtcgaggtaggcgtcacgctgctcccgggcggcctgtaccaacctcgcttttacttcctcgttcgacttgtcgacctcgcgatccatatcgccgggcaatatccccatctgcgcaccgcccactttggccatccaacgcccgaagccgccggtggcgcccttgactttatttgccggagtcgcctgaagcgtattcacctgctcgtccgcctcggtagccttattgatgagagcctgtaccttcgcctgcaaaaagagcatctgaatgtacgcttcgcccttttgaagcagcacatcgtaccattcggaaatggtgttgtagtagccgaagctctcgccgtatttacgattgagctcttcgaccttcgccttttcctgctccttcgtgccgttgaactccttgaggcttttcagggtcgagtcgatctcgaagcgcgtcttgatcatctgcgcacggccctctttctcgatctccacgcgctctttggctttggcggctgcagcctcctgcgaatcggaataacgatcccacaggacgatcagacccgtgatgacggccgaaagccccagcgtcagcgtcgccatgagcgccgaggccgcagccgtcgagatgcccagcgacgcggccagccgagtattggctgccgtcagcaggttcttcatcttgacgaccgtcacgagccggaaagcggagtctttgttcagggcattcatcacctgctgcaaccccatcgtgatggccagcacgctctgcacgcgcgtctgaatcttgacgaggttctcgttctccgacgcgaaggcgcccatgatgcccgtagccatcgtgaaggccccggcaacgccgctcgcaccgcttatcaagccctgaagcccggcattgtcgtgcgagagaatcttcgtctgcgtgcgcaggtcgcccagcgtatcctgcaacaatgcggcacgctgcgccatcgtctggtactcctgcgagttctggcgcccttccagacgcatcttcgccatcgctccctgaagctgccgcaactccatcgtaagcccgcgggccgtcgcagagttcttttcgtgctcgctgcgcagtccgttcagcacggctttgtcctcttcgagcgcacgcgtacaggcttcgatctccgcgcgcatctccgtctgcgccttgcccggccccagccggtcgtactgacgccgcaggtctttcaggcattgttcgacgtagcgtacctgttcgcgctgcgccgcgatgcgctccgtgatgctttgcgaaacccgctcgacacgatctccgagcgcctcggcagacttcccggcggcatcgaggccgccggagagcttgtcgcgcatcaaaaattctatttcaacgggtttcggcatgcggtttacttgttttcttgagtcttgattgtatgaagccggaaagcgttcgcggcttctcttttttcttgacgtagcgcggcgcgtctgccagcatcatgcgcagcgtctgatagttcactccccagaggatatatcggacgctccagcctgtcgcggcagcgatctgccacaccattccgaaggggctatgggaaccttcgtagacggtctttaactccccttttttcttctttcgcggctcagcctcggtctcatcgggttcgccgtcgagatcgatctgataatactcataaaagacttcgtccccagcaggcgcaggaactgcatgttcgcggccagcagatactcgtcatcgacgaaccagcgtagcagccatgccagaaggccggagaacagccacgtagagaaggctccccggcaaatcgtcagggctaccatcttcgacacacgccgcccgtgcagcgccatgtaggccagctcctcgtgcttggtgaactccagcatccgctcgtaggtgacgcctgtctggaggtagagccgcgcgaggcgtatctgaccgcccagacacgggcggcgcatcgtcagacgcacgaccttgcgggtaaacgggattttgaaaaagggcagcgagactccgatgtccagcagagcctccgctgcctcgatttcgatctgcggattcgcattcatcgctcgacgatgctatccgacaacttcctcttcctcgtccggagcgaagtcgaagccgtaaggcgatgctgcggaatcatccggcagcaggaaggttgccttgcagtgaatcttcatcacgtccgaatagtcgtacttgccacgcggataggccagaagcgaaacctttgcggcctcggtttcggagccgtccgccgagcggatgacaaccggcccctccagcttgatgcgcttcgagggcgcgttccacttcttgccgttcttggaggtcgtaccgcccatcacctgcacgaggttcgcgggcttgagttcgatcaggtcgaactcgatctcgctcgtaccggggttctcctcgatctccttcacaggagccgaacgtttctgtgcggcccagattttattcgtcgacggttcgtcaccgccccaatccagaccgtcgttgctgataaggcccaactccttaccgtcgaagacgaaggattcgagaccgtaaatgaacccgtcgtgttccgatgcaggggtctgctgtgtgatgtctgccatattacacgatgtttttaatgagttttacaatacttttcagcggattggttttcgtaagcaaagccgtcgcagttcctcccgcaaggaagcccgcaagcagccaccgataccatgtggcgggcggccgtttcatgcgctcgtccgttcgtcgggtcagagctgcggccgacagcagcgagtcggcgcgtgcacggtatgcctgcatctcatccagtcgagccatgagcgaatcgataaggacgcgttgtcggaagacgcggttctcgaagtaggtgcagcgccgggcgatgctgtcgcatctgccccgaacgacgatcttgtcaccctgacgctcggcctcgatgctcgcacggccgttctgtgcgctatatttcgcgccgtcgggaagatcaaggaggctctgcgtcggaatcgtcatgtccgtccgctcctccggaaccggctccgtatactcccggcgcgtcgtcgtcgagtccgtctgcgtctgctcctgtgcatgccgatgcgtgtcgtgaacggcggcggcctgcgcttcgagttgcgctccgaagctgctctgctccgacgaggccgtctgctcgctcgtcgtgttcttgattgctccgcacgccgccgtcagtagggcgacgaggagcaacacgaggggaattccccgaattcgatttttcattctgtgttttgagctgtttggttaactgatcgatctttttattcagggcgtcgatcttctcctccatgactttctgattggccagcaggtgggcgttatccgcttgcagacgcacgttttcattgagcgtctcggtgtacttctccgtcagcaggtcaatggacttttgcagcgacgccagaaaatcgttattccgctgacggcgcgtgaccagccatgtcaccacggatgacaagaagccgctcggaagcgcccacgtcagtatttgcatcactacgctatccatttctctgtttctattgaagtcaagcccgctcgatcatgcgtgcgattttcgcgatgctgtcggcgtacaccgtcggatcagccgtgcaatagccggctttagcgacctcgtaggcgaagcgctgcacgtcgtgacgatacggcatcgccgcagcgtagcgtttcgcagacaagaccttgaagtggtcgtgcaggcactcttccaccgtgtcgtagtcgcgaaaggctcggtcgacgtcgtagcgataacggccgtcgaggagtggcgtgatcgaatgcacgcggacgaaattgccgccctgacggtcgtcccggaagtattccgtcgtgcgcacgatccgacgcttgcccgtccatttgtcgccggccgtgatgccgaaaaggttgttgccgatggcacgcttgccccagcccgtctcgagcgcagcctgcgccgccacgaaaagcgggttcagccctgttccggcgcagacacgctcgatggccggatagtaagtgcgtttgaattccgaaggtgtcatacgctatgcccggttactcctccgatgcggtcagggtctccgccagcttcgcacgctcgtcgtcggtcagccctgcgacggccttgccgacggccggaatacccgcattcttcgaaacggtgacgccgatggcttccagcgcgaccttcacggcggcgagaggataacttttgtcgccgatgacgataccgtcggccgtagttgcggcaggcacgtcgtcctcaatgaagacgaggcggcagattttgcgtgcgaccagatcgttgacgcgctcgatgtcgtcgaaggagaccgtatcgccctccttgtagtgtaccgtacggtcgttcttgtccgtgaacggaaccagcactttcagtttagctttcataatcttttggtttaatgcgttcgtattcgattatccgacgacctcctcgtcgccattctggtcacccttctggtcgtccgacggctcttcccctgtgcggcagtcgagcagcgtcaccaactgaccccatgcgatctgcgtgtcggccttcatcagcatcttgatgaagtacagctcgccgctggcctgcaccttgtcgacctgcaggcactcgtagtcgtcggcgaggttgcagcccgcgtagaggttcgaatccgtgcccagtgagcagatcgtaccgacgatcacgccgtcgggccagtcgttcagcgcagcgatgcgcttgcccttgaagcgggcgatgttcgtcgaggtcggatcggcgcccttgtgatgcaagtccgtgagctcgttgtcgtacttgtcgaagtcggcggacgacatcaggaaggtgaagttcgcctgatcgcgaaccttatccgccgtcttctcccagacggcgcgcagacgcttgatctgactcgtctccgcacaggtcgccttcaccacatcgggatcggccagcatgcgcgtgaggatgccgttgaagaactgctcctcgccatcgcccgatacgccctgaatgaagtgatagcccagctccgtgccgacctgcttgagcacctcgctcagaagtatcacctgcacattgctcggaagctcgcggaacacgaggttgcctgtcggctgccacttcttccagaacttctcgaacgatcgcgggttgaactccgtatagaccatgatgtcctcgggcttcagaagacgttcgtcgatcttgaactcgcccttcgagttctcgctcttgggcatctcgacgcgcttctgcagcagcttcgaaagctggagacgcgggatgtagaacttgtcgccgatgctcgtctccatgtggatcagccccttctcgaagagctgattgcccgtggcggccatgaccagaatctggtcgaggacttcgccgccgtaggcggtttgaatattcggatttgccataattgaatgaattgatgattgattactgtttgagccgggcacgaacctccgcttcacgctcggcgaggtagtccttgtcggtcttgccttcggcgccggtcgccgaggcgagggtctgcatgatgcgacgcttgggcttgcgtgccgcaagcagcgtgcgcgtattctcggggtctttgcgcatcagcgccttgaaacccggcacttcgtcggcgccgatgcgctcctcctcgcgtgccgtgtcgacctcggcatcataggccgcctccgcggcttcgcgctccttgcgttcgagatcggcgaccttctccttgagggcgtcgcgctcggcgaccaccgccgcgtgctcttgggccttgttcacgacctccgtaatgcgcgacatgactgccgcctcgtccgcacagtcggaaaaggccggcatcgatctgagtttgttgatcatctgttcttgatttttaagtgaaacatgttcgatgtaaagtgccgtgtagcgctcgcagcgctcgcgcggcgtaagcgacgcggagacagcggtgcggtcgtcatcgaagatctcgtcgatgaaaccctcggccagcgcctcctcggccgtcagccaatgatcccggccatccatgtaggtcgcgcgtatctcctcgacgctcttgcccgtgcgtgccgcgtaaatctcgcacagcgtgttctcgatctgctcgaggtgggcgacgcaatccttcaacttggcggcattgccgaacacgtcgctcataggctggtggatcatgatctggccgtagcggctcatcttgacccgtttgccgcagccggcgatgaacgacgccgtagatgccgcgatgcagtcgatgtaaatcgtgatgtcggccgcggactgccgcaggaagttgaagatggcgatacccgcggccacatcgccgccgacggagttgatccttacgtcgatcttgcggtaggttcgctcggcggcggcgatctggcggacaacatcctctgcgccgacgtcgccatagtcgccgatttcaccatataacaggatgcagcaggtgtcctcctgcggcccgggaatgatattgaaaatgcgctccatttcgtgctttgtttaccgcaaaattgagcgtcattttcggcctctgcaaatcggaattttatcatgcaactttctgattgcatgatgcaaccgtaaagttgtgtgatatttttcgcgtttgtgattcacttatttatcggtcaattttgcaagggtaaaaacacgagcaatgacgaaaataacctccgaacagatgcgccgctgggcgctctcgatgtacctgaacgaaaaccgcacgcaggccgaaatcgccgaggcgtgcggcgtgtcgcggcagaccgtcatacgctgggccaaagccgacaaatgggacgagcacaaggcgtcgctgaccatgacccgcgaggagcagatcaagaacctgcagcggcagatcatggagatcaacaacgtcatcctcggccgcgagcagggtaagcggttcgcgacgcccaaagaggccgacgccatcgccaaactgaccaacgccatcagcaagctcgaaacggaactgggcattcacgaagccgtcagcaccgcacagcgcttcgttgcatggctacggcctgtcgaccccgcgctgacgaagacattcgccgcgctgttcgacaagttccttaaatccctaatgtgatgaagcagatcgaccgagacgccttgaaggagtgggaagccctcaagcaatccatatacaacgacacgcccatcgacgagacgatgtccccggcccagatcgagaagcaccggctctatctggaggcacaccccatcgagtggatgaagttcttcttccccaagtatgcgaaataccccttcgcgcctttccagaagagagccatccaccgcatcatcaacaaccccgagtggtacgaagtactgtcgtggagccgctcgctggccaagagcaccatcacgatgttcgcggtgctgtacctgacactgaccggccggaaaagcaccgtcatcctcgcctcggcgacagagaaagccgcagcgcgtctgctcgcaccgtatcgggccaacctcgaatcgaaccgccgcatcattcagtactacggcgagcagatgtccgtgggcgagtgggccgagctggagttccgcacccggcagggcgtggcgttctacggcgtgggcgcgggaaatgcgccgcgcggcgcgcgaaacgaggcgatccgtcccgacgtgctgctcgtggacgacttcgacaccgacgaggactgccgcaaccccgatgtcctgaacaacaagtgggactggtgggaacacgccctctatccgacccgcgacccctccggttcgctgctggtcatattctgcggcaacatcatcgccgaagactgctgcatcgtccgggccggcgcgatggccgaccaccatgacatcgtgaacatccgcgacgccgaggggcgcagcacatggccggagaagaacaccgaggagctgatcgaccgcgcgctgtcgaagatatcgacgcaggcgcagcaggccgagtatttcaacaaccccgtcgtcgagggcaaaatattcggcccgcgcaaatggggcaagattcccgacctgcgacgattcccgtttctctgcatctatgccgacccgacgcagtccgaggccaaaggtgctgccaagaacaagcaggggtcgctcaaggctgtgtggctgctcggaaagctcgaccgcgtgctctacgtcatcaaggggtttctcggcaagatgaccaccgaggagttcgtgacgcacttcttctcgctctacctctacgcccgggccggcggatgccgcgcgatatacgccgtgcaggagaataactcactgcaagaccccttctttcagcaggtgttcaaaaaggcattcgccaacaaggcgaagcagacgggaatcagcctctcggtcatccccgacgaaaagaagaaaaccgacaaggccgtgcgtatcgaggccaacctcgaaccgctccatcgcgaggggttgctggtgctcaacgaggccgagaagggcgacccccacatgaagctcttggacgaggagttcaagttcttcacgatggcgctgaaattccacgccgacggcgtggactgcgtcgaaggcggcaaccgctttatcgacgacaagatcggagaactgcatcccgtcgtgacgacgccccgttgcgtcatggcacgccgcaacaaatacagacagtaaaatatggcacaattcatcatccccgaggactacgacgcctcgatccatcaggagattctcgacgcgctgatccgctccgaccggcagatcgtcgaaatatgcgaagaccgcgccatcgccgagatgcgcggatacctcgcggcgcgatacgactgcgaccgcgttttctcggccgtgggcgccgagcgcaaccagctcgtgctgatgatggccctcgacatcgccatctaccacatcttctccatacacaacccgcgcaacatgtcccagatccgcgtcgaccgctacgaacgcgccgtggaatggctcaaaggcgtgcgcaaaggcgacatctccgtcgacgggctgcccgaaatcgagcaggaggcaaaagaggcagcctcgcagttccaaatccgcagcaaccccaaacgcaacaaccgattctgacatggcaaaagaaaagaaaaagaaaggcaaacgcatcaccgccggcggcaatatcggccgcacgccgacgcagaccatcgtgctccagcccacacgccgcggagggctggacgtgtccgcctacatggacagcatccggcaggcggagctcatcgactggccgcggcgcgcaaaactcatcgacctgtacgccgacgtcatgctcgacggacatctcttctccgtgctgcgcaagcagaaagcggcgatactctcgacgccgatacagttccagcgcgacgggaacctcgacgaggcgatgcaggaacatatcgattctccgtggttcaaccgcttcatcgaagaccttatcaacgacgaatgggagggcgtcggcggctcgctattccagttcttcctcgacgacaaaggatggatcgactacaatctgataccccgcaagcacgtcgatgcgatcaaccgcacgatcctctgcaatcagacagacctcacaggcgaaagctgggacgacttctccgacctgctctatgtcggtaatccgcgtcagatcgggcatctcgcggtcgcggcgttctgggtaatactcaagcgcaacaacgtcgcggactgggccgagctgggcgagatattcggccggccgatccgcgaaggaacctacgacgcatgggacgacaaggcccgcgagaaactcatagacgatatctacaacatgggcggcgcaggggtcatcgtgcaccccgacggaacgaagatcaatctgattcaggccgggaacatatccggaggcagcgacctctacgaccgtctccacgcgacctgcaacaacgagatcagcaagatcgtcaacggcaacacgctgaccaccgaggcgggagacaagggtacgcaggccctcggaaccgtgcagcaggagggagaggtcgacatcgcattcttcatcaagcgccgcatcctcgacattctgaactacgaggtgacggacgtattcgcgtcgatgggaatcgacacctccggaggcaagttcgcattcgtgccgcccaagaagaaagaccccgaaaagcaggtgaccatcgtatgccggttgaagaacgaagccgggctgcccatcgatgacgactacctctacgaggagttcggtattcccaaaccggacaactacgacgagatgaaagcggcgcagcagacggcagcgtccgcaaccgaagagcaggccgggagtgaggacggcgaaagcaccgacgaggacgatccaacgaagaccggaaccgaaccgaagaagaaccgcaaacttacggatcgcgtgcgcgattttttcggccgcgcccccgaaagcgcgggggcggattcagactggtagtcgatacgctttatatcgatgcggccgaaaagcgaccggcggagaacggcttttcgttcgacagcggcgtgctggccgccgcgcttcggaacatctacgagcggcggtacaacccacgcacggagatcgacgccgagctcttcgaggaggtcagccgaatattcgatgcggcgaccgacgccgggttctcaggaagcgaagccggcggcgacttcatggagcagttgcgcaccaacaacgccgtgttcgccgcgttcaagacccaccgcatgggccgcgacatggccgcacagctcatcgacgaaaacggcgaggtgaaatccttccagcagttccgccgcgacgtcgagccgatagccgatcatcatgtcgaggcatggcttagaaccgaatacgacaccgccatcaagcgggcgcaccgcgctgccgagatgcggcagtttatggccgaggccgacgtgctgccgaacattcggtggctgccctcgacggcggtgaatcctcgcgagtcgcacatgcccttctacgaccatgtgtggcccatcgacgatccgttctgggaggagcacaagcccggggacgagtggggctgccagtgcggctgggaggcgactgacgaccctgtgaccgacaactcggggctgggcggcgagcggattaagccttcgcccgggctgaaaggcaatccggcacgcacggcgcagctattctccgacgaccacccgtatttcccctccgactgctcgacgtgcgcgttcaagggcgtgcagctcacgctcttcaccaaccgcacgaaggactgctaccactgcaagaacgtactcaaagcggtgcagaaggcagaaaagacgctgacgacgaaacgggcggagctcgccgaaaagaaatccgacgcgacatcccgcgtcagccggttgtcgctgccggcgccggccgtacattcaagcacggaattgaagtacggaacggtgatgtgctcgaagtccgacatccggcagttggtatatcatgccgccgatgccgaaagcgtcgatgtgtcgatgaagatggatcgctatttagaccggctgcgattcgtgcgcgtggaggagccgaagcacttcaccggcaagaagcagtcgcgcggactggtcgaatacaccgtgtatgagttggaggtcggcaagcagactttcgtagtgaaatgcgaggctcggacgaaccgcgaaacgtcggagatatacgaacacccgtattcgatataccggaaatgaaaaaagcatccgaacggccgaaagacactcccgacatggagctcggacttatgtgcggatgcttttgaaagcgttggcacgccttcatctgcaaatataacaacaaatctgccgaaaacaaaattcagtgcaaatttttattcgaacggcgttcaaatggatatcaaagagttctcgaagctcattcgagcgaaacagaaagagatcgacacgctgatgcggcgcaagatgcccatccgggtcggaaacatggcgaagcggcactttcaggacaactttcgaaagagcggcttcgtcgacggaggactacacccgtggccgaagaccaaacggcagctcgccggcggaacgtcggcggccagccagcacaaaccgctgctcagcaaccgcaaccacctgttcaacgctgtgcgctacgtgccgggcgactatcgagtaaagatcgtgaacgacgtaccctatgcgccgatccacaactggggcggcgagacgtcgcccgccgtaacgcccaaaatgaggcggtttgcgtgggcgatgtactaccaagcagccgggaagtcgaagaaaggaacgaaaggccgcaaagcggccgaaaatgccccgagcggcgcactcccgcccgaggcgcagatgtggcactctctggcattgacgaagaagaaacgactgcggatcaagattccacagcggcagttcatcggccagagccgggaactcgaagagcgcatacgcgccgatgtagaaacgcaggtcgaatccgtacttaaattatagacgatggaaagtgtgaaactcgcgctgatgaagcgcatcgaagaggcgatgccggaagtccgcatcgacgaggactacggacaactcgaatcgcaggaagaccagtatccggtcgtgttcccctgtgtgctgatcggcatgggcgacacggagtggcagccgatggccaaccgtcccggagtacagcagggcaagacatccgtcacgctgaagctggcaatagactgttacgacgacacgcatatcggctccacgacggaggagaagatcgccgagcgcgaacggatggccgaccgcctgttccgggccgtgcagggaatgagattgtcgcagaggatgtccgagctcgaccgacggcgtagcgccgaatatgccctcggcggcggggtcaaggtctacgaggtgacgttcgagtatctcgtgcgggagatcgtgtgattattccccggagaacaggcggagctgtccggccgtgagcctcggaaccttgatcttcggagccgggcggatgtcgccctcgggatgctccttgcagtattgccggatgatggccatcacgcgatcctcggaaatgaagaactcctgctcggagagaatcttcagggcgtcatcgaagcgcagacgctgcacctccgtccagtagtaccagcggcggcacagcgcctcgttgcgcttgtcgattaagtccttgtttcttcctctcggcattcacgggggggggtatttcgggttttcaatacacaaaaatagggagaaaacaaaattttctccctcgttgcttaacgaaattaagctatttgtccggaaaatactacctttgtatcaaaatcatctgccatgaaacgactgttcctcctcttctctatctgttttgcgggcatcctcctctcatcctgttcggacaaagaggaaactccgacctcggatgaactgattggtactgtatggagccaaaccacggaagggcgcaccgatacgttctatttcgcgctcaaccgcaaatgcacagccgaatggaaatacgaaaactccgatccagtcagacaggaatatctgtattcctacaaagcgccgaacgtcacgattgagaccagcgcgaatacgttcacgggacgcatcgacggcgacgtgctttctatccacatcttcgaccgcgatttgacattgaagaaggtcaggtaataaaaatcccgctccgaaaagagcgggatttgctttgcagagggacagcgctattccatcgccgccagcgagagcggcagcgcacgtttcacgcccttctcgtccttgtaggacaccgagataaactgacacgaatccacgggccgataggcgctctggatgatgtcggtcgcctcgatcagctccggatagcccgacttgcgggcgatctcccgcagttggagcacgcggctcgccttgaggttccccttgcggtctttggccagcaggttcatcaccatctccgtcagggcggccgaatcgtcgtccttcgccagcgagcggatgaatgtcttgaccttgtcgaccccggcgttcaccgtgtcgtcccagccgtcgttcgtgcggtagcccagagcgaccgtaatgccgccgtccgaggtcgtgaactggttgctgtggcggtcggatttcgtgcggaacagctcctctttgagcgcgatcagacgctcggcatcgctgaacacctcctccttcgcccgacgcatctcctcgctcaacgcctgtaggcgggcgaacttgccccggcagaactcgtcgacggaatccttatacgccgcaatatcgtcttcgcgtttctgtttctcggcacgctcctcggcctcaagctgcgccttcaactcggcgcgttgcgctgctgtcatttttgtaatatccatgttttttagttcattttacacaagggtaaacattcacgtccttattcagccaagatatctcccgaccattttgacgagtaaagccataggccaacgcgccgtaacgtttttcagcaccataaaagcgccataccacgcaatcactctccagccggaaaagatcgccctttttaaggtcggacagatgcttgacatcctgtatgaaatccgataaatcgcaatcggagataacctgtttcattgtaataccgttagtcgtcggccggagctcgatctcataggtgatctcttccccttcagcgttgcaggtcgtagtttgcatgacaatgcgaccatcggcaggttccattaccgttatagccatcgactctggtttgacacccatgcggaaagcgtagaaatttgtggcgattcgaagtgcgtccatgcgtttatatcaacatttagtttactgtttatcaatcgtttaatcgtatcgcaaacataacactaccattcggaacacgcaagacaattcgcacttattttcaacactttaacttattcatgaggtcaatcgaatatctcctcgaccaacgccatcggatatactttgcgtattccgcgttccgaatccacgtcgaggcgcaccccgataagattaccgctgttgtcgaacacgtatttcgcgctctccagctcgctgattcctttaattttcactttcatcgttttactctgtttttggtttgtcgtttctgtcgtcgttgcaagcgcgtcggccgctgtctgcggcgggttcgcgaatgccgtctctccacctgcgagcggaaacggcatccggctgcccatcggcggagttcctctgcgaactgcgcgaattctggcccgaatcgggatatcaaattcgccgtccggagcatcgcttcacccgtaatacgcgccgaaaattcaatcgaggaaatacctcttgcgaccggctcgtccggagtatcgccgccgaagtccacctccggcagtacacggacgggctggccattgaccatcagaaccgcatcgctccattctcgttctcccattgccgctactttttaaggttcaaagactccagttcaaaaaaatacttaagcaccgtaacagtctcgcctatatcgcatcgacgagcctcctgtcgctcggtagcctcacctaattcgtgaatatcatccaatcgttctaattgcttctgcaattcccgcaatggtttccgcagggcattagccaagatcgccgcttcggtgggggtcaacgcaatcatcgcttccgtgtatccggcacatcccggaataggttctctaatccatttcattaccactactttttaagttcgcccatcactccgcgctccatacggttctttacccgctcttcgcacgcctcgaggaacatccgcaggccggcgatcatcttggcgttctgctccgacgggaaccgggtgttcagcttctcatggcggtcgagcaaggccagaaccagctgctcggattgcaggccggggatcatcgtcccgtcgtcgttcttctgcacgaaccgaacgacctgctcggtttcgacgtattgcgtcttgccgtcgttgaagccgaggcactcgcggatcacgtagcaatgcgcacctccgtagatcgcatcatcgaccaccgagatcgtcggctcgtcgctcggatagatcaccgcatcgatgggtttgacctctccgacaacacaccatgtgtaaagtcttccgagcggaagtccgatcttcgattggcttccgcacgcctgcaggacgatctcttcgttatcgaatcctcggaagataccctgatattcatcccggttgtcgaaaaccaagacgatctccgcaccttgacggcattcagttagttcggccggcagccgccacgcacctacttgtttcttttccatagctgtcagatataaaggttaaacaattctgtaagtcgtccggactcgaaccggaacaacagccgcatcgctttggccattgtgctatgcctccgatggaaccgaaggccctgccgacccatttgccggtctttcccggctgtcagagcctttcgcgtcatctgtccgatggagtcaagcgtcctgttccgctttgccaccgccattctccggcgggtaacccctgcgccatcgtcgccctacttgcactcgggtcttcatctcaaaaaaggggattgcgggtggccggggactcgaacccctgtgcttatctccaaacaacagccaatctttcccatttcgttgttcttttcctgtcgccacccccataccggttactccataggcgcacctcctttctgttcgatgttcacatatcggcgaatgacagcgagcgccccgtcataggtatgggtttgcatcacttcgtgcatcatccgccctgcaacgaactccgcatgagctttgtctcgatcttgctcttctcgcgatttctgtgtttggaagccgagcctccgaacgtcggacaggatcgctgctcgcgcctccgacatcagggtgaaaatatttccctgctctccagacaaatcgacggttattgtaggtttctccatatcaactcggtaattggttcggtcgaataaaaatcggaatctgcacgacccgctgcggcttcacgggcttcggtttgcgcaggatcgcctcgagcttcggaacgagagcctgcagctcgtcgacggtcagcatcccgaaaggcttgccggcgatgcgcggatcgaggcagaactcatccacagcggcgaacgtccggtcggccgtatccacgccgagccgctgcatgcggttcagtgctgccgaccgtgcccggcgcagccgctccctgtatgcggccgagggttcgccgagctgcttgcccgtctggagacactcgcacatctcctcgtactcggcaggggtcatctcccgcagcgacgacgtgcgtccgccggtgaactgcgacaccagcacttccttatgctggtcgagatcgatgctcttcgctttggcgatggcatagaaccgtgaatagttacgcttccgtttcatgggactgttcggttttcgattcgacggatgcgtgggcatcgaaagtttcggcaaggaagatgcgcatccgccgctggcgggcgacgaggtattcgatcatcgcgccctcgctctgccgccaatccgcaatcatatagatcgcatcgctcttgagcagcagcttgacatcctcgcctatctgatccgcccactccgcctcgaaaggcaatccgttacggagcggactgacaggctcgaagccgaagcgccggattttcgcttccgcggcctgaaacttggagatcacctcgtcgatgggcagtccggtgatcttcccgctgatgtagattttcttgatatccataggtcaatcttcgattatgctgctgtcatgcagcagtcccttatagcggcgatcccgggccgccttcgtgtcgaacttctcgagcgtccgccattcgggaaacccgaactgcttgtacttgattttcggctgcgggtagtcgtccttgcggacgatcatgaaccccgccttcagcaccttgttttgcgagtctaaattcatatcattttctgtttagtgttttcccttcccagtagcgtttggcctccttttcgtagatcgtgcattcccccttcggcccgatgtagcgacctttgctgaacgccttgtgcccctcgacccagattttcagcgacgcatcgtacatgatcttcatcgccgcgcgtccttccgggcgcttgccgtcggcatggctgacgaagatgagcagtttgttgcgatggcgctccttgaaggcgatatactccttgtagctcatctgcgtgtattggaacgaatcgatcaccacgaaatcccacgagcggggtttcgacagagcttcgtccatctcggcgaaggtcatcgtcgcgttgtactggaacttccggccgcactcgtccaaccgatagcggcggatggcgtcctgcgtcgtgccgcccagcccctcctccaacggcaggtagagcacccggccgaactgagtcagttccttgcagaaggaggccaccgccgaggtcttgccgttgcccgaattgccccagaagaagaccacgcccgtgcggtcgatctcgccgacgcagtccgcccagatgccgcccgggcggatcgtccggcgcttgagcgtcaatacctgtttggctgatagtgtgcggcccatttgaacagcgtttgaacggggttatttcttgatttgggcgagcttcttgttcttgtgcaccgacttgcggacgcgccgcatgtcgaaatactccttcggctgcttcttgtcccacggattcacggacgtcgagaccatcgtgcgggcatcggtcaccacctcggcgatcgcgctgtcggcaatcaggccgttcgcccggcagacggccgtcacctcgtggcgggtcgcaggggtcaggtcgatgaaccgccggccgatgcgggaatagatttcgtcgtagcccttcttgtcgtactctaatccgatgctcatgcggcgcttgatgtattcggtcgagaggaagatgatgccgcagcgaccttcaagggcattgtagatcgaaatgaagtagtagaacaccgtatccatcagcttgtcgccctcgtcgaagacgagcagcggacggtcgagcacacgcagcgcgtccgtcacggcttggagtttctcccgcaggctcgtctgggcgagcttgagaccgatgacgcgggccatttcgcgaatgaagtccccgcgccgcatatcctccgagcacgagacgacgaacacgttttcatgcttcgacgcgtaatcgtgcgcggtcgtcgtcttgccgatgccggcattcccgactacccacgagacgttctgattcgcctgcgcgtcggagagcagaaccgacagctcccggtaggcggtcgtttcgcagacggcccactcctccggattgatcggggagaccagtgaccgaatgcgcaggaacatctcgtcgctgatattgtcgaacttgccgttcagaatcgcgctgaccgtacccgtgctcagaccgagcgaattgaccgccttgttctggctgggatatttggacacatacgcctgaagctgcgtctggacggtctgtttctcttcgagtgataactgtttcatgtcgatatggttttaagatttacattctgctgaaaatggccgtcgggtcgaaatccatgttgctgacggctttcgtatattcgccgaccgcaagtggttcggtcgtcgcctcgaccggtacggccaccattgcgtcggccagccgctcgtactctttttcgctgatgcctttgagggacggagtccgcagcccgtgctgttccggagcgacgccgtgttccagctccagcgcgtgcgcctcgatctggcggcgaacccgctcgcgcttgttcgcatcgtcgttgaaccggatcagctccatgtcgcccggccgctgctcctgaatgttgcggcggatcgaaaggtagggataggccaccgtctcgtagcgcagccccatcggagttcgggtgtagagcaacgcccgatccatgcgctgcgggtcgaacttcacgaagaactcccggccggtattatcccggcgccattcgtagtccggacgaccgtcggcggtcagcacctcgtaggtgtactttcggtttcggtattggatcgtgatgccgtcggccgtgaacaggctcggctgctcggtcgtcagccagaacagatcgatcatgtcgaactccgtaaccggatcggtggccggattaacgctcgcacggtacatctcctcgtgagcgatccccgtccggtagtgcttcatcgcattccacttgcggcgagccgcagcgtaggccgccagcatctcctcgtaggtgaacagcttctccttattcgcctcgaggaactcccgattgatcttccacgcctccttcgaggagatgttgccgcccgtgaatcgccaatcctcatgcagcacctgctgctggaaccggccgaaggcagactcgatgctcttcgacgggccgttgtacggcgccgtcggccgattgatgcggcagatgttcgcgaagaacttctgcgcgatcttgctccgctggccgccctgattgtccgtgacgatctcgtagggcttgcagccggccgtctcgatggccatgcggaaggcggcgaactgcgcgtcgaagttctcgctggcgctgaccgagtagccgagcagcgtttcgctgtaagcgtcgatgacctcatagaccgagaccgtgcggatgacggtcttgccattctctaccgccttgtagaacaggttgagcttcgtgccgtcgccgtaccacagcgagtcgcgcatggtcggcatctcggtcttgttgcggcgggcgtagagctgcttggctgccagctcgccatagacggcatcgtaccacagcggcttgacctccggccgttcgaggtattgaaccagcgatgactgcgaggcgagcggcttccatccgcggcgctcggcgatgcggttgaactcctcgaagagctgcttggtcgtgtagaccggaacccggcagcggcgcagggcgacgatctgacgcccggccgctttggtaattttcagcgtatttgcgttgcagaacttacccgacacgaggcaggcgtagccctccttgcggtactgtcggagtttgtcgcgcaggcgggcctcgctttttgggagtgtgtgtccgtaggcatcgcgcagctcctcggcggcggcgaagatattcgaccagacgaccggcgtgttgttgttgcgcgcgcggcgcatcgccttctgcgtgttgaacatctccagcagggcgttcagtacccgggcgttcgtcgtgtattccgtttgcttctcctcgggcagatgctcgccgctgggcagcaggtggtcgtggtagaagcgctgcgcctcagcgtccatcgcaagcggcatttcgtcctgtttcattgtcttctcgggatcaccgtatttttcctcgaagcggatgcggaaccgttccggcaaggagcggtactcgatcagagcatacgatccgagtcccttgcccggacgtagaacatttacccggttccgcgtcacgagatgatcgtaagcactacgactcattaccgcttcgccatcgtccgaccgtgtcagctcgtgcatcgttactgctatcgtatttccgaaatattccatcacttcgttgttcttgatcccgcgccggcatcgctccggacaacacctccgcgttcgcgggaaaccgacctactcccaaatttcgcctatctcatcagcggcctccgatacttgatccctgacactctcgagcgtactgattgcactttgcattttctcgccgcgttccgaatcctgaaagggctcggggagattgtcgtaagcggcccactcttcatcgcaaagaatatccaaacgttcgtagatatcttgcagctcttctcgaatcgcctgaagctgtttacgtcggttgttattcatcgtttactcatttaatgaatccgtgaggctttgagcctcgaatacgatattgccccagtcgcaaatcttgacgtcggagaacgttttcacggaacaaccgttccggctgatatcagccgtgcttgtggcgttgtcgaactctactcgaacgccgttcgagaaagtctgaataatccgccgcacgccgctggcatcatgctcgaaatcggtctcgcaattcggcatgaaaccgttcgtgacatcgacctcgctcatcacgcgaccaccgtcttgcaaggccatgcggcgaatcttttccgccagcgcgctctgggtctggaacgtcaaggcagaccacagcgtcacacggcttacgcccaacgcccgacggatgcgagccttcttggctgttggtaattcgatatatttcatctctgtcctgttttagtttggttctacatattagtcggccaacttctcttcgagataccttacatcttcctcccaaaggggaagcccgctcttgatcttgtatagtgtcgctgcttttctcccgatgagcctaaccgcttcacgatagaaatccgtatcgtcataggcagcagccttgccgaggaggaattccgcgaggctcgttcggttctgacgggcgtcgtccagctcgttattacgctcctcgagcatgccgttcaaaaccgtaatgcgtcgataatattccgctacgatggcgctcgatccgtgtttcttatactctgtacagaactgatccttgtccatgttccccgcggccatatacatagcctctatccgtgcgtactcttccgatgtaaccgttttgcccgtccgatcttcaaattcctgctgtgtcataatttcagttatttaattctatttgtatcatatcgagaatgttgctggtcaccatgctattgaccgccagaactgcgctaccgataccgttctgttgcatccagcgcttcgcccggttcattgcggtgactttgctcgaaccatccggaataaatgcatccagatcgtcgtagtcgttcgtcagtagttggaaccaatatcgtttcatcgccgggttattttacttcattgatgatcggtcgcagggagcagccgtaagctgtcaccagagcgtcggacatgcgtttcacgaaggaagcggacgcttcgaaaacaatcccggatttctccgtatagcagaatgcaataccccgcgtaatcagataaaagcagactttgttcttgctactctgtgtctgccacgtttttagttcctctttcatatccatgattcaaaattttcactacctttatagcgccttaatatgttaagacgatgcaaatataatacgcaaatgcgaatattcaaaataaaacgcgaataattttcgcttttgcgaataattttgaaacaatgaatataaacgcccgatttgaagagattataaattccttatataaagggaataagcgagcatttgcgcagagcgttggcatatcggcaactgtcgtggaaaatgtagttgggactcgaaaaggaaaaccgtcatatgatgttcttgaaaaagtatgcgcaaatgcgaatatatccgccgaatggctactgaccggcaaaggtgaaatgcagcgcgcagaagatcgacagttggccattcccgccatcaaggagcagttctccctccgtacagatcgcacgattggaatgcagagcgtcccgctgtatgaacttgacgccaccgctggactggtggccctcttcgatggaacgacccgacaggttccggtcagccatttgcaaattcccgacctgccgccgtgtgacggagcattatatgttcgcggagactctatgtatccgcttctgaagagtggagacatcgtattatataaggagattccctataccgcgagcagtatattatggggcgaaatgtatctactgtcgttcacgctcgatggcgaaaattacatcaccatcaagtacatacaaagggcagacgacgaccgtttcgttcggctcttcagccacaacccacaccattcaccaaaagagattccagcagactcgatccgcgcgctggcattagtaaaggcgagtgtaaggttcaacacgatgggataaaagtgttctcgcgcacttttttcaaacagcaaacagcggcaacttgaacggttgccactgttttttagacgattatacaaaaataagcgattgaaatttgtaaaaagtgtgtcattaagggggtacatataccgccattttcctgcatttttgcacggttttcggtagttaaaggttagtttaggcgcatctctttttcacgtttttggcagtcttaatggctgtttaacgtggatatttcgttttgaaacacgaaaaaacagaggcagttttaacggccgtttttgtggccgtctaaatctcagatcatagaacatgactgccgaaatggcagaacgaccttactttgtttggtgagggtttgaacggccgtttgaacgataaaaatacgatactcgaccggcggcatgacggcctcacctatacacgcctgccaatggttgaaatcgcggcgcaaacgaccttcggcacaaatccgaccgacgcttgcagacatcaaaaaacctccgaattttggccgtttctgaccgttttcggaggcgatgtaacatcaggggtcgaacacctcgttcaaatctcgttcgaatgtaacacgaaagtaatgttgaagtaacatttggtttcgcggcgcatctgggggtatcgtgctgctaaccgtttgatatataccggttacctatctttctgtagctgctcttcttttatacatttggttttatcccccgtaccctgcccctgtcggcagaggaacagcctgccgtaccgacagccgacgaacaggccgccgctctgatcaacgcccaggagtggttccggctcgaagcatgctacccggagatccgcgacgaactgtcgcccttcgtccggctgctctgcgaagcctctctgggcagtcatttcaaccggctgccggagagctgcaatgccatcggaacgctgctcaacgactaccaacaggaactcttcgccgatcccgaaggctcgatgctcggctggctcctctccatgcttatcggcaacctgcaggagctgggcgcctacgaacaggcggccgacctgctcacccagttcgctgccggacagagcgaggaagagagggcttcgaccctggcgacccaacggtggttccaaaccatggcccgacatccgcgcacgtcgctcacgaaacccgacggcgaaatccggctgccgctgaccgtcggaagcgaaacggtcaaaagcccgctggacggcacggacaaaaaggtccataacttctataccgacataacgatcggcggccgcaccgagcgcttcatcttcgacacgggttgcagcggcgccagcttcgtttcggcggaattcgccaagcgccacgacctcgaaatcatctgcgattcgattcccgtgagcggtatcggcggcaacggattcgtgaaattcgccacgaccgactccatgcagatcggaccggtcacgatccgccacccctacttcatggtcttcgacaacgacgaggcttcggaccaaatcggccatatcgaagccgtcctcggcaccgacttcatgcgtctggccggccagatcgagcttcgccccaaagagggctttttcctcctacccgccactccggaaccgacacctgcaagcgggcgaaacctgatgcacgacacctcctcgggacaatatattctcaacacgctggtcgccggaaaagacaccgtcccgatggtcttcgacacgggcaactcccgcacgggactttcgccgaactactacaccctgcaccgcgaagagatcgaccgcagcgggaaaaagcgggaaacggccgcaggaggtttcggcggaattttgcgaggtacgggttacgacctgaagaatataaccttcacgatcggcgacggctcccgcaccctgaaaaaggtgactgtcacagccgacttcggccccgcatccgaacaaccctatttcggttcgctcggaatggaccttttcgaaaagttcgaccgcatcgtcttcgacttcggccggatgttcgttacggcggaataaatccggcggtttccgtcccgcaccctgcacgaccgaactgcccgtcccttcctaaaaatttttcgcaagacgatgaacgcaacgacaaccgtccttcagacagacagtctgctcttccgcccgacacttcccgacgatctggagcgtatctgcacgatcatccgccaggcccaggcgcagatgcgcctgcggggaagtcgccaatggcagaacggctacccggcggcggcacatataacggacgacatcgaccgcggatacggccacgtactatgtactcacacaggactcgtcgtcgcttacggggctgtcgtcttcgacggcgaaccggcctatgccgaaatcgacggcacgtggctcgaccaagccccatacgtcgtcctgcaccgtctggccgtcgcacaggaggtcaaaggacagggcatagcgaccgaattcatgcgccgcaccatgacattggcccgggagcgcggcacaggcagcttccggatagacaccaacttcgacaaccgttgcatgctccgcctgctggccaaattcggcttcgtccgctgcggagaaatacattacgccggagatcctcgcatcgcattccagaaaatcctctgaccggcacatcctgccccgcaaaacgtcgaaccggtcgttttctcccacaaatatccggctgcttccagacacccgaaaatgccgacggacggtccatccgaccgtatttattcgtacctttgcctccgctttaggtacttcgcccggcaaaatgccgataaatttaccttgcacgcggctttttccgcacctttgcaagaggattcttttacgatgaaagcaggtctgcgacaaattccgatacagggtgcagcaccccgtctggccggcaacagggagtgggacggccttcccatgccgacccgattctggggcatcctcgccgtagctttcggcgtatcgctctcggtcatagacggagccatcgccaacgtcgctctgccgactatggcccgtatgctgggcatctcgtcggccaattcgatctggatcgtcaatgcctatcagttagccatcgtggtttccctgctctcgttttcagcattgggcgacgtgatcggctaccgtaaaatctacatcgggggactgggtatcttcatcgtcgcctcactgggctgcacgttgtccgactctctcgccacgctggtcacggcccgcgtctgccagggattcggggcggcagccatcacgagcgtcaataccacactgatccgcctgatatacccccgccggcacctgggacgcggaatgggcgtgaatgctacggtcgtagccgtttcctcggtggccggccctacgttggcttcgggtattctctccatcgccacctggccctggcttttcgctatcaacatcccgatcggactcatcgcgtgtttgttgagctaccgattcctgcctaaaaacccggtacgcatccggggccgccacttcgactggcgggacgggttgatgaacgccctcaccttcggattgctgatcgcttcgatcgaaggttactcgcacggcctcaaacccagctatatcggaataagcgtcatcctgctggtcctcatcggcacactgttcgtgcgcagccagctccacaaaccctatccgatcctccccttcgacctgctgcgcatcccgatcttctccgtttcggtgatcacctcgatctgctcgttcatcgcccagatgctcgctatggtcgcgcttcccttctacctgcaaaagacattcggatatacagaagtacatacgggcctgatcctcactgcctggcccgctatcattatggtcgtggctccgatcgccggcttgctggtcgaacggatccacgcaggagccatgggcggcgtaggactgcttatcatggcggcgggcgtagttctgctggcttttctgcccgagcaaccccacgtcgccgacatcgtctggcgactcctgctctgcggcctcggattcggcctgttccaatctcccaacaacagcatcctgatcgcctccgcaccgcccgagcgaagcggaagcgccagcggtatgctggcaacagcccggctcacgggacagacgaccggagcggctctggtagccctgctgttccatatcgacccggaaaacggctgccatatcgccctgttgcttgccggagggtttgccctggccggttccgtcgtcagcttctcacggctatcgctcgccctgccgcagggccttacccgaagcaagggaaaagcctgaatcccgcctccgacacactgttttgcggatcctcccctcccttttccctatacccaaaagagagaaaagacaacaccaccggcatcgctcgtgcccggcaacaaaatccggaagtgtgctacgaacgaacacataaatatcaccgctttcccaaacaccccgggacacgcaccacattgacaaaaatatcccgaccgataaagcccacttatcaccaagaaaaaacaagcatattgcattattccggattatttgcatcagactgcaaggtccgaaaatcctcctgcgacagtatatccggaatcccgaatccatttccaaaccgcgtcagaaaagagaagctgaacctctcaacgaaaaaggagaatccataccactccattttcaatatgatcgcaaaataaaaaggatcgacccgtaacgggtcgatccttcacatatcttgtcagatcaaagatatctattacaaatatccctggttctggctaccgaaattcgggttctgcgtcagctcgctattcggaataggccatacgaacttcgggctaccagcagtctgtttcatagtctgcaaataagacacctggtcaaccaaaggagcaagtttggcattgatatcacgtttgaaaccttgtccccagcgcttcaggtcgaaaagacgcgtaccctcggcaagcatctcgcggccgcgctcttcctgaatagcattgaaaagtccagatatcttcgtgccgtcaagcaacgtaacatcatccttcacatcatccgccgtaagggctgtcagaccacgggccgtacgcaactggttcagcggatccaaacctttagcagggtccaaacgatactgcgcctcggcatcgaccagatacatttgggagatacggaacatcttaggtctgttgcgataaaccaacgtagtcgtattggtctggaaattcttgttaccgcggaacttaccaataagaactccgacccccttatttccactgatcgtaacattggcattcttaacaaggaaaatattcgtacggaaatcggcatcttcaaacaacttgacaatatgctgctccggaatataggtaggagcatagaagtatacccccgaattcggctcccagctactgttcagatagctaccgaacgagttcacagtcgtcatggtcgtacgaagtacctccagttgcagaatattctcggtagaagtatcctcgcgccacattctttcgagaccttcagccgttgtcaccaaaggataagttccataaagagactgggcgtactggctggcctccgtatactggtgaaggtgcagagccagctctgcgcggaatgcggtaatggcatctttggtcaggtaaatctgatccgtcggagtaccctgagcagtcacggttttctcagcttctacgaggtctgcctctacgttctcatacaactttgccaacgtaccgcgagccagtttcgcttccggctcccactctttcggatagggaagacccaactgatcagcggccttgtccggatcatagtcctcacagaaaagcagcgcggcacggtgcattacataggcgcggaagaaatacatctcgcctttgtaaacatccactttcttttgctcgtcgggagtaagatattcataagctgcatccatatgacggatcgcatagttgatatgcatcatcgtcgtataataactggaccagaacgacgttacatcctgatcagtgggatacaaacgccagttgaaagaatagataccctgattaccgctaccgatgcaaacattcagaacatccacataaaggtccggtatcgagtagaaaccaccggaaaggagcgctttcaggtccacataaacgtaacctctcacaccctcgcaatattccatggtgtacgcatcctcgggccggatcgccgtttcggggtccatatccaagtcgcacgacgtcacagaaaagagggtaacgaatgccaaaatcgaatttattatctttttcatagtctaagccttgtatttatttttttataatgaacactgaaaattagaacttaaactcaaggccgaaagtgaactcgcgcgtattcggataagtatcgacatcgacacccttctctgcagcctcaggatccaggccgttatagcccgtcacagtccagaggttacggccaccgacccaaaccttaaggcccttgatgaacttcgtcttctccataatatggctcgggagcgtataagccaactggatatacttcagacgcaggaacgaagccttctcaagcatacggctgtcaaaattgatcgcctggtccagacggggatatctcgcctggtcgccttcctgctgccaatagtcccatgccaggtcgcactggttgaactgggaagagagtcccatatcggcattagcaacgaaatacatcgtattgttgagcgcgtagttgccatgaacccaagagaagtctgccgtcaggctgagtcccttccatgcggctgtcacaccgaaaccgccggtataaggcgcataaagcgaagtacccagattcaccaaagcagcctggttgaaatcggaagtaatgccgccgtctgccgtagtccaggtatccagaccggtttcaggatcgactccgcgccactcctgcattgtccaagtcgggaacggatcacctacgctgtaagcctgcagaccgttgcccatataagcgaattcaagacccggttcccaaagatcggtcagctggttcttgttgtagttgaaagtcgcgtggaagttcacgaaccagtctttcgaagcgtaaatatcgtagttcaacgaaaggtcgataccggagttgcgcataccgccgacgttaccggcacgaccgctgtaaccacctgacggagccaacggaatggacatcagcatatcgttggtttgacggcgatagtattcaatcgagagagagagttttttccacaactcaatattggcacccacggtcaatgtattctggctctcccacatcagatcagggttaccgataccggataccatccaagtcgtgtaaccgccgtaagccgaacccgcagccatatattgacggtggttgtagtcaccgataccggagttaccctgtgtaccgtaagacactttcagactcaaatcactgatagtctgattgtcgcgcaggaacgtctcattcttgatattccacataccgccgacagcccagaaaagcgcattgcggttgttctcaccgaaacgcgagcttgcgtcgttacgcaacaaaccgctgatgaaataacgctctgcgaagttatattcaagacggccaaatacagaattcgaagctgactgtgcgatgctgtaggtcggcagaccgccggaaacttccgtacccatcgcgatattcaggaagcgcgaagaggtgataccgatcgaagctacagagaagctgttgttattccgatagagggtttcctcaccgagcagcgccgtaaagttatgaacctcattccaagtatgcttgtactcggcggtattggtccaagtccattcatagaaacgctggaacagttcactggcactaccagtaccgaacttacccgaaggagtaggagtttcagggctggaagcaccgtgtgaacgccagtcaaaagcatccacagcaagagaggagcggatcgtcagccccttcaccggagtcagttcaatgaaagccataccattcatcgtaatacgattctgccagcgaggcatatagtctgcagtcatcaacgggttgatggcttgggtagcatcaaagaaattgagcatctgaccgttatcgtcatagagaggctggtaaggaggcgtaatcaacgatgccatcaccgggttcgatacatacagactgcccatcgattcattcgtatcagcaaccgaactgtgctgataacccaaaccgaggttcaagcccaaacgcagccagttgttagccctggtatcgatattcgtacggaagttgtaacgatccaactccgaaccgggcagaataccggtcttattggcatagttacccgagaaatagtaagaggtcttcgccgagccgcccgaaaccgacagatcgacctgatacatcggcgcatttctctcaagaatctcgttccaccacttgtagtcattcataggattatagttctcatccatgaacttagccagaccgaaattacggataaaatattgacggccggacgcaatcttatcaggagtcgtcaaggcatcgcccgacaaacgaacggcaacagccgcaccgatataatccaacatctcgttcgcactcatcatattcaattcaggcgatacggcactcgacatggagtattgtcccgtaagcgtcacatcgacactctcctggttgcgacgaccggttttggtctgcacatagataacaccgttggcagcacgcgaaccgtagatcgaagtcgccgaagcgtccttgaggacgttcaccgaagcgatatcgttctggttgatcgtctgcagcgtcgaagcctgaatcggcgcaccgtccaacagaatcagcggcgacgtatcggcacccatagaacccagaccatgaatacggatcgaagaagtcgaagtcaactcaccgttaccggtcataatctgaagaccggctacctgaccctgcaaagcgtccacgacgttggtgctgggacggttttcgatcttctcggacttcacctgatctacagaaccaatcaccgaaccgatcttcttacccgtaccataaccgatcaccacgacatcctcgatgcccgtagcctcttccccgagagtcacgtcgatatgcgtcttaccggctacgctcaccttctgggtttcgtaaccgataaaagagatcgagagcgtcgcattggcgggaaccgtcaatgtaaactgcccgtctcctccggtcgtcgtaccggcagacgtaccctctgccacaaccgtagcaccgatgataggttctcccttctcatcggtaaccgtacccgtcacctgcttgttttgcgcaagagccaacgaacagaaactcagtacagtaattaacgatagtacaattttcttaatcataagcgttaatttaaaaattgagtttgaaataaaaagttccgagcaaatatagaaattaattgcttcataagcaaataaccgtattcaaaataatcaaaaaaagcacgtatattcggatttatctcctttcaaatcccatattgaccaatttaagatctgacttgcgacaaaaacggcgcggaaaagccattcgcccgacaaagcagcggaaaaataccggttttacaccccgctcttattcgacaccttataatatataaaattcggcagcaatggatcgaaacgatttttttcgtatcttcgcgccgaatcaaaacctaaacaatttatggcttttacagaaatattacccggaatacactacgtcggcgtcaatgaccgcaccacgacccgtttcgaatcgctgtggtcgcttccttacggcgtttcctacaactcatacctggtcatcgacgaaaaagtcgctctgatcgacacggtcgaagtatcgttcggcgaacagttcatcgacaatatccgcgcgatcctgaaagaccggccgatcgattacctggtggtcgatcacatggagccggaccactcctcttcgatcaaaaccctgcgcctgctctaccccgagatgcagatcgtgggcaatgccaaaacccttcagatgctcgacggatattacggcatccataccctcacccgggaagtcaaagagggcgaaagcatttcgctcggccaaaaaaacctctcgttctatatggcgccgatggttcactggcccgaagtgatggtcacctattgccccgaacacaaggtactcttctcggcggatgcgttcggcacgttcggtgccctgaacggcggtatcctggacagccagctttcgctggaccatttctgggacgagatgcgccgctactacgcctgcatcgtgggcaaatacggcgcccccgtacagaaagccctccaaaaactgagcggccttcccatcgaaacgatctgctcgacgcacggccccgtatggcagcaggaaatcgggcgcgtaataggtatctacgatcagttgagtcgctacgaaggcgaaccgggtgtggtgatcgcctatggttcgatgtatggcaatacggcccagatggccgagaaaatcgctcgggagctggccgtacagggtgtaaaaaacatcatcgtttacaacctttcgtatgccgacatttcgaatgtcatccgcgacattttcaaatacgacacgctgatcgtgggttctccgacctacaacggcgaactcttccccgaagtcgggtccctgctgcaaaaaatcagcgaacgttgcattccctgccggaaattcgcctatttcggctcctatacctgggctggagcagcggtacgcctgctgggagaattcgcccagaaaatgaaatgggaggccatctgccagccgacagaaatgaaacagggatacgacgatcagggggcacaatgctgcacggcacttgccaaagccattgccgaaaaaatccggtagaaaatcccgattcgtccgcaataaacagggacggtgccgtcattggcaccgtccctgtttagtttctatctctttctgagtcttgcgaccgcggcacaagcccctatttcatcacctttacgaccgcctttttgatccgtccccgaccgatcatcggagcatgggcgtcctcgggaccgaaaacgacgaactgtccgggcctgatcccgacgaaaagctgcggccggtctgcaaaaaaccgaatgtcttcttccgcatcgaaaggcccccggggaacacggcactcccgacgctcccgccaacccatcgtttcgacttcgccggcaatcaatacctgtacgtcgatatatttatcgtgcacctccagcgaagcctcctcttcccgtttgagctccccttctgtcactttcataaaaatttcagctccttcgatctcgtaccgccccggctcaagagtattcaaatcggccgcagcgaggtattccaacgcccgcttcaaccgggaatcggccccgcaataaaaagcccagtttctcaatgaatccaaaatcataacaacaactatcttttgaccggcctcaaccggaccacgaccggatagtgatccgacaaatccacatcgtacaaaacctggtaatcgagacactccaaatcttcggaatagaggacgtaatcgatccgcaaaacatccatgaatccgcgaaaggtataggaataccccttaccgctcgcccggaaagcatcgtcgaggtcttgtgccatcacccgataggtataggacataggcgtatcgttaaagtcaccgcaaacgatcttacagcccggagtcgcagcgatcgcccgagcgatcgtgtccgcctgtgccgcccgcaacatgctgttgtcgcggaacctgcggaagatattcttgattttcgctccgccagcggtatccgtaagaaactgatgctccgaaagatacttatcgtcatgcacggtaattgcggtcgaatgcaagtggttgttaaagatccgaatcgtatcgtcccccaccagcagatccacccataccgactgcccgtcctgcttcataggacccaatatcgaatgagattttccgaggatccggtatttggtataaagcgccagcggaaatacaggatcccgtctgttcccctccataaccaccgtacgatcgtaatcggataacagcgaatccaactcttcggccttgctcgaggtacggttgaactcctgtaagcagacaatatcgggattcacacggcggatcacctccgtcaccccgtcgaaactccactgtccccggtcgttataaaaactgcgaacattgaaagtcagcagggtgatcaccccccggccgaagctcgtctcttcgccgtaatgacggcgcaactccggcttcaggaagagcggcaccttgaaaaggcccgccagcaacagtacgacaagcggaagggcaatgcgccaccgccaccgaatgatccagtacaacgttatcagcagggtgaatacataaaccgccggagcgaccagccccaacaccggaaaaatccagattcgccccgggtggacgaacggcgccagcagcgttacgatcatggctgcacccgtcgcgaccgaaaggatcagcatcaccccgttgaacacgctgcccggcaaacttttccgacgtttccgggaagcaccgtgtctgtaatcgtcgtaatactccctgctcatcgatcaatagcggatcacccctttgtgtttccaataatagagcagcaggaatccccacaacataccgccgacatgggcgaagtgggcgacaccgtccatccggcccgaaatgccgaagaaaagttcgatcacgccatacacgaccacgaaccacttggctttcatcggaatcggcggaatgagcagcatgatgaccgcattggggtgcattacgccgaaagcaagcagcagaccgaacacggcacccgaagctccgaccgtcggcaccatcagggccatcataccgacattgccatagcggtattccagccagccgaccaacagttgcaacaccccggcaccgacgccgcacaccatgtagtaggtcagaaagcgcttcgaccccaactcgtattcgagcgtacgaccgaacatccacaaggcgaacatattgaaaaacaagtgggaaaatccaccgtgcagaaacatataagtcaccaactggtaggaatggaacaacggactctcgacgttgaaaagcgccagcgccccgacgattctgttcccgacaggcagcagctcggtcgcaagaagcatcaacgcattgatgataatcaggttcagcactacgggaggcgtcgaagaaaaatagcggctattattcatagacaaagtaagatttagatgcaaatgtaacgattatatcccttccggcaacctctcaaccaagtttattgcggatttcttccagtgtgatttcggccatgaccgccttgcccgaaggcgtgaagctgacattcccgccttcgcagagctgccccagcagagattcggcctcctccgtcgaaatcgtacgggacatgctgcgggctccgctgcaagccatgacagcggcgatcttctcgcgccgcaatgcctgaacgtccacaggcacggcgaactcctgcagcaattcgtaaatcaaccggtcgatcgtatcgtgcggaatgtcggccggaacgccctttacctcgacggctccgccgccgcaaaactccaggtcgaaacccaacgccgcgaaatcgaccgcattctcctcgagcaacgcatattcgttttccgaaaacgcgagacgctccgggaaaaggagctgctggctgaccgacgatccgttggtcaggagcagcaggtaattgtcgtacaacacccgttcccgcgcccggcgcaggtccacgaccacccacttgccgccgtacagcgccgaggcatacccgttgccgagcaccgtcacaccgctgaaacaagccgcagggccatccatcagccgttgctgcaccggttccccggcagaaggaatgaactccatttcggtcggagcgaacccggcagaagggatcatctcgtcgtatcgatcctccgcccccacaccctttccggcaggcatctccccgtcgtaaggagcgtcgaagcccgaaaaatccacgtcgggcatccgttccgacacatcggaagcgtaatccgcacgaaaagggttgtaactctcgttcgacatcgccttgggttcacggtaaacggcccctttggtcagcaccggaatctcgacgctgtccgtctgatcgaaatccatgagcggcaccgctcccgtcttggcgagagtttcccgcacggcagcgttgatgatctgccacacggcctcttcgtcagcgaacttgacttcggtcttctggggatggacattgacgtcgatccgcgaagggtcgatcgtcaggtagagaaaataggagggcgaacaggcatcgggaatcagcttctcgtaagccttcaggatcgccttgaaaaaatagggggagcggaaataacgcccgttcacgaaaagatactgttccgaactattgctcttcttggcggcagcgggacggcccacgaagcccgtcacccgcacgatcgacgtgtcggcatcgacttccagcaggttctgtttgatatgacgccccaccacatcgacgatccgcgaagccagcgaagcagcgggcaaccgatagagcggctgatcgttcatcagcaattcgaaccccacctgcggattgcagagcgcgacccgctgaaactcggacttgatctgccccgtggaagtcgtactcttttcgaggaacttacggcgggcaggcacgttgtagaacagattgcgcacataaaactgcgaccccacgggacaagccgcgagggtctgcgaaacgaactcgccgccattgaccgtcgtgagcgtacccacttcgtcctccgcctggcgcgtacgcagctccacctgcgacacggcggcgatcgacgcgagcgcttcgccccggaagccgaacgtcttgagcgcataaatatcgtccagcgaagaaatcttgctggtagcatgccggtcgaaagccatacgggcgtcgatgggcgacatgccgcaaccgtcgtccacgatctgaatcagctccttgccgccgtcccggaaattgaccttcacgctgcgggctccggcatcgatcgcattctccatcatctccttcaccaccgacgacggacggttcaccacctcaccggcggcaatctggttcgcaacgacctcgggcagtaatttgatacggtcagccattactcctcataatcgttagggacgaccgtaatcggagtgtagggattgaactcctcggtctgcggggttttgggtttctgcatatcggaaatgaacgcgaccacacgcggatagccgaacaccataagcaaaagtaccagcgccaccagtacgaccatcatccacatacggccggagcctcgcgacatctcttcgcggcgacgggccgcccgggcctgactttgcgtacggatatactgtcccggcttatactctttgcccgcatcctcggcccgttcgccgcgcagctcggcacgacgccggtcgcgctcctctttctcgggatcgtagtaacgcggcaggtagttgaatttattggcgtgtttcttaaacggcgtaaaaccggacataaaattctgttttttaaggtaaagacagcagcggtccacacaaggctccgaatcgacgaatcgcaccggcacgcttcatcgtcatccgcaaaaaatacggagccggcaacacatcgtgtttcgcccgatcggaatgcagccgtccaaaccggttatttcttcggtaaagatacgaaaaacacccggaataaccagccatgtcactccgggagatctgacttttcgaccgtagattaccggaagaaactcttcatcctgtcgaaaatgttgtgtcctttggacgcctcggcccgctggaaggaaggctgtgcggccagttgctccaccaaccgcttctcctcggcattgagcttggcggggaccgtaacatccaccacgaccagtatatcgccgcgtccgtaaccgttcacgtcgggcaagcccttgccggccagccgcaacaccttgcccgcaggcgtacccggcgcgatcttgatccgcgcccggccatcgaccgtcggaacctcgaccgaaccgccgagcaaagccgtcggaaccgtaatattcaaattatggatcaggtcgttgccatcgcgtaccagttccggattgtgctcctcctcgatcaccacctgcaaatcaccgttcacaccgccgtgacgagccgcatttcccttgcccgacaccgtcaataccattccatcgcccacaccggccggaatccgaatctccaccacctcggagcctttgatcgtcccttcgcccttgcactcgtcgcagggattggtaatcaccttgcccgtaccgccgcacgtgggacacacgctctgggtctgcatccgaccgaaaaaggtattttcgacacgattcacataccccgctccgttgcaggtcgaacaagtcgaataggagttggcgtccttggctcccgtacctccgcatttaggacaggcgatctgcttgttgatcttgagcttcttgaccgttccggcagcgatctccgccagggagagcttcacccgcacacggatatccgtaccacggcttacgcgacggccgccgctcgaagaggtccgataacttccgccgctgaaatgacccccgaaaatatcgccgaactgcgagaagatgtcctccatcgagaacccgccgccgaatccgccgaacccgccgccggctccggccgcaccgctcattccggcatggccgaactgatcgtatctggctcgcttttcgggattggagagcacatcgtacgcctcggccgcctccttgaacttctcctcggcctccttatcccccggattcttgtccgggtgatacttgatagccgcctttcggtaagctttctttatctcatccgcgttggcgttcttcgccacgccaagcacttcgtagtaatctctcttttctgccatagtattcgaatgccggacttcgattccggctcaatattctttttcaatagtcgtattttcacactctacgctcggcacaatagtgcgcgacggagcaactccgcgcccgttaaacgaaaacgcccgttactctccgacgaccactttcgcaaaacgcaacaccttgtcgcccatcttgtaaccgggctgtaccacatcgacgatcttgcccttcttctccttcccggcatcgaaacgggccaccgcctcgtggtgatcggtatccaactccagtccgagcgcctcgatctccttcacattctgtttcttgagcgtttccctgaacttctgtgcgatcaatttcacaccctcacgaagcgcctccaggtcattgctcttctcgatcgcttccagcgcccgctgcaaatcgtccatcagaggcaggaaattcttcacgcactcggcgcttccgctctgcaccagctccatcttctcccgcagcgtgcgcttgcggaaattgtcgaactcggcctgcaaacgcaggtacttgtcctgccactccgcaatctccgcctcccagtcgcgcgaaggcaactcctccgaagccgctttcggtgtattcctatcccctgccattgtgtcagcatcggcagagctttcatctgtcacattggcacacggctccccgtcgcaggagggatacccatcgcccgccgcgaagccttcgtcgccgccaaccgcttcattataaaccttttccttgtccatatctgatgtattatttgattttccactcctctattgtccaaaatatataccaaccggcagaagcatcagcccaaaatgaaaattgcaggccgtttatccatttccggcagcagggccgagcgccactcacgaaccgtcagcgtgcggatatactcctgcggcgaggtaatatcgacggccagcgtaagccgcgtatcgggggcgcatacctcgagcaactgcccgagcagcttcgcattccggtaaggagcctcgataaaaacctgcgactgcctctcgccggtcgcacgccgttccagcgtccggatcgcccgggcccgttcgggcggtttgaccggcagatagccgttgaaggcgaacgactgtccgttcaaccccgacgccatcactgccaggatgatcgacgaaggaccgatcaaaggcaccacgcggattccgagccggtgacaccgggccaccgccagggccccgggatcggccactcccggcacacccgcctcggagatcactccggcagaacgccccgcaagaatcggacgcaccatctcgtccacagcccgggcatcggtcgtatgctcgttcagctcccggaactccaggctgtcgatcggacggccgaagcccgccttcgacagaaaacgccgagccgagcggacattctccacgatgaaataatccagcgagtcgatcacggcccggttcgccgccggcagcacgtcccacacgggcgtatcctcggcgatcggacacggaatcaggtaaagcgtacccggctgtcccggttttcgttcctgcgacatatcttcattccatttatcgaaaaccccgcctctgccaccgccccggcatccggctccgtcgggattctcttttttactctttgctgtaaatccgtttcacacggcccgacacggaggtcatcacctcgtaagggatcgtatcgagtacgcgggccatatcttcgggcgtattgcccggcaccgcggagaagatcaccacctcgtccccctcctccacgccgggaatgtcggtcacgtcgatcatacaactgtccatgcagacgcggcccacgatcggcgcgggccgccccgcgaccagcatcgaccaccggccgcaccccagatgacggtccagtccgtcggcataccccatcggcacggtggccgtcacgctgtcacgcgtcagcttccccgcccggccgtaaccgacggcttcgcccgccgacaggtgcttgagctgcacgatacggcttttgagcgtcgaaacgggtttcagctcgtcgttatgctcgaagccgaaaccgtaaagtcccaaccccagacggcacatgtcgaactgcgcctcggggaaacgctcgatcgccgccgaattggccgtatggcgaagcaccggatagggaagcgccgcagccagacggccgctcatacggtcgaaacgggcgatctgctcccgcgtataacgatcctcctggggcatatcggaacagttcaggtgcgaaaagatcgtagcgaccttcaccgacggagtttcgcccagcgtttcggtcagcatatccaactccccttccataaaacccaaccggtgcatgcccgtatcgagcttgatatggatcgggtaactctcctctccgacccgttcgacggctttcgaaaaaaacgccagcgaacggaaattgtatatttcgggctccagccggtgagcgaccatcagatcgaaactgccctcgtcggcattcagaacgacgatcggcattctaattccccgctcgcggagcagcaccccttcgtcggcgaaagctacggccaggtaattgaccccctgatgctggagcatctgggccacctcgaaatccccggcgccgtagctggccgccttgaccatcgccacgagccgcaccccgggacggagccgcgcacggaaataattcaggttgtggatcatggcatcgagatcgacctccaataccgtcgtatggctcttgcgttcgagcgcatgactcacccgctcgaagtggctgtcacggctgcccttgatgagcaccacgcgcccggccacatcgtcgcggcgcaggttgcgcagcagctcgtcggtcgtgcggtaaaaggcgctgtcgcaggcgaaattcgccccggcatttcgaatacggtctcccacgccgatcagacggctcactccggcggcggccaccagacgggccacttcgccgtaaagcactccgtcctcgacgccgctctgctcgatatccgaaagaataagtgtcatgggacggccggcggccatattatgcaggtagtcgagcgcaatggagagggagttgatgtccgaattgtaagcgtcgtcgatcagcagcgaaccgttgattccctccttcaactcgaggcgcatcgccacgggccgaatccggccgaaatcggggtcgggaaagcccatcacccgacagaacgccccgaccaactgggcatcgacacgcccggccccgctctccagaacccctgcgggcaactgctccggcagcggatattccgcagcgtcctgcaactgccggccgccgtataacgtgcggatcatccgttcgagcagggaggagccaccatgataaataatggttcgcgctcccttcgccaacaccaacttttcggcactcttctcctcgagcgaggtgaaattttcctggtgcgcctcgccgatcgaagtgaaaatcaccgtatcggggcggatcatccgctccagacgcaccatctccccgggacaggagatccccgcttcgatcaacgccaactcctcgtccccttcgatcatcagcagcgagagcgccacgcccaactgcgaattataacttttcggcgaccggaaatatttgacgccggcaggaatctgctgggcgatccattccttgaccacggtcttcccgttcgaacccgtgataccgaccacgcgccccttgaaccgagtccggtgatgggccgcaagctgttggagggcagcgatggcgctcggaaccaccacgcagccgcaaccggccggaagttgcgtcttccgctccgcaagaaatgccttcacatcccggcgaaccatctcgccaataaaggcgtgggagtcgtgattggtacctttcatggccacgaacagcggctcctcgccgaacgaacagttgcggctgtcggtaagcacccgtgccaccggcaaatcctccccgatgagttcgcccccgcaaatgcgggcgatttccgataacatgtatttcatgtcgtatctttcctttacataactgccgtcaatccatacgcagagtcaccaccgtaatccccgctccgccccggtcggcgtgttcgtccgcagcccgttcgacctccggcaccgtgcgcagataacggcggatctcctccttgagcgcccccgtccccttgccgtgcaggatcgtgaccgtaccgacgccaaccatgatcgcgtcgtcgataaaatcccgcacctcctccaatgcttcggcggcacgcaggccccgcacatcgatatgatccttgaaattgagcttgcgggccgacacatcgaccgataccaccgtgcgcggctgcacgggcctggtcgcctgcttgaattcggcgcccgagatcacgacgagcgaacttctatccaccgtcgtaagaatctgtccgaatgccacctgcgccttccggcccttgatcgaaagcaccacgccgggaatgtcctgcccggcgatcttcaccttcgagccgacctccgcctcgcggggtttctccggcacggcaggctgtgcgacctccggagtctcgccggcctgctgtctgcgctcggcacgacgctggcggcggcgttcgagtttctccatttcgcgggccacccgttcgtcgtgcgccgcatccgctgcatccgtcctctccaccctgtcccgaaaatcgttcaactccttacgggccaactgggtaagctccttctcggcctgcgcttcgcggatcgtccgaatcgtattctcaatctgacggttggcgtcggcgatcatccgctgcgcctcctccttggcctttttcaagatttccgagcgctcctgccggatgcgcgaaagctggtcggcataggtctgttccagctcctcgaccttgcggtcggcgatccggatgcggtcgcgcttctgctcccagtaatgtttgtcacgggcgatttcacgcaactgtttctcgaggttgatatgatcgctgccggccttttcgcccgcatcgcggataatatcctccggcaacccgatcttgcgggcgatctccaccgcgaacgaactgcccggcttgccgatctcgagccgaaacagcggccggatattctgcacgtcgaacatcatcgctccgttggcgattccctcggtgttcgacgcataatacttaatgttggcatagtgggtcgtaatcaccccgtaacagcctttgctgcggagccgttcgaggatcgactccgcgatcgccccgccgatgataggctccgtacccgaaccgaactcgtcgataagcaccagcgtccggttcgaagctccggcgagcatgttcttcatattgagcaggtgcgacgaataggtcgaaagatcgtcgtcgatcgactgctcgtccccgatgtcgatcattaggttgcggaacaggggcagctccgaattctccgatgccggaaccaggaatccgcactggaacatatattggatgatgcccgtagttttcagacacaccgacttgccgccggcattcggccccgaaatcaccaggatatgacgccgtttgtcgagttgcagatcgagcggcaccacctgcttgccctgcgcccggagcgtctgctgcaacaagggatgccgcgcattgcgcagcaccagccggtcgtccgtcgaaacgatcggcttcaccgctccgttggcaacggcccagcgggctttggcacggatcatatccagatccgaaagatagtcgccaatcagcgcgatccgatccgcttcggggcgaatcgagtcggtgaaggccgagaggatccgcacgatctcgcgccgctcggcgtactccagctccttgagttcgttattgatttcgacgacctcgaccggctcgacgtagaaggtcttgcccgtggccgattcgtcgtggatgaaaccctgcaacttgcgtttattggccgctgcgaccggaatcaccgcccggccgtcgcggatcgagagcatcgcgtcggcctccacgataccggctttcttggcattcgacaacacctgctgcaggcgtttggcggcctgcccctcccgctcgcggatcatccgccggatctgctgcaactccggcgaagcgtcgtcccggatcttgccgtactgatcgacgataccgtcgatcgcccgaacgatctccgggaaagcctcgatcccccggctgcggagccgcagttcgggatatagctcctcaccgcgccccaggataaaaccggcgatcgcccccgccgaagccagcgcccggcgcagcaacacgacctcctcgacttcgaggaaactgccttcgatcttcagtttggaaaggatataatcgacatcgacgaactcgtcgtccggaaagtcccgttccatctccagcagacggcgcatctcgtccgccagcgccagccgccgctcgacatcggcctgcgaagtgctgaattgttcggcgcacaacctttcccggccgccgcgaatcgtacacagcgccgcgacctgctcacgcagccggtcgaaaccgactttctgttcaaagttcgccggatagatcatcgcacagagaaaacattcgaaactatcgggccgctttcagggccttgagcgaatcgcgccgggcatgtttcgcctcttttttctgctgcttgcggtcggccttttcgggatcgcggccgaacagcgagaaatggacgtaacgagcaggatgggcctgcaagttggccagcagcgacgccaagttcgcagtcgcctcgttgagcgattcgtacagacggggatcgctgacgagctgcccgacagtcccctccccggcattgacacgggccaagatcgcattgaggttcatcagagtcgaatcgagcgccccggccagattctcacgctgtatttggtcggtaaaattgcttaaattcaggataatactgtccatacgcggagagttctcgccgagcatctccgaaaaacgggtcaaattcgctacggcgctctccagattcgcacgctgcgacagcaacataccgtttacgctgcccgtaatcgaattcaggtgcgacatcgtaccttcgatattcgcggcgttctgctccataatcagattcaggttatccatcgtgcggctcaaatcccccacgacctgcgacatcttctgcttgaaaaattcgagttccgaacccgccatatccatcaggcccttgctacggctcgaacagagggtgtccccggattgcaggtaggtcccggcatcgcccagagcgatttcgatcgctttggcgcccatgatgctgttgctgtagatccgggcttcggaattggacggaatccggtatttccgctggatcgtcagttgaagtacgacctcgttaccgatcgaaggatcgaacgaaatatccgtcacggctcccaccttcacgccccggatcagaatcggcgaagcgttctgcacgccatcgacctggtcgtaagcggcataatagaccgcgttgcgactgaagatgtcgaaccccttcagaaagcggatacccgcccagagggcgccgatcatcagcacggcaaaaatgccgatcttaacttctcttctcatatacctgtttttttcgttttatttactgtacgatccggtcgccccgacaactcaccacgaacgcatcgcggaactccctgcgcacctcggccaacttggcttcggcctgcttgcgggtatcgaaacgccccacacaatacttatacctgaaccggccgccggtaacgaactccgtgacttttccccggtaacttttgaactgccggtccttgggcggcacgcgcttggcgctggcgatcaactgcacggcataaaacgtcttctcctgttcggctttcccggttttgacactacccttatccgctttgtccgaagcggcagccgaagccggctctgcgacatcggcatcggcctgttcgtaaatggcatcgtcatcgacaagcagcgcaccccgaacgaaagcgacgtaatccttcaccgcatcgcacagcgcacgtgcgatttgagcctgccccttcgccgaattcatataagcatactcctccgaattggaaaggaaacctatctcggtcaggataccgggcatatcggtagcgtagagcactttgagcggctgccgcttcacaccgcgattgtgccgcccggacttgacgtaatgtttctgcaccagacgggccatcgcttcgctgtattcaccataggtgaactgcaggttctggatataagcccggacgatcgccgccgtcttctcgttcgacatatcgagcagctcctcctggttgttataatagagggccctctcgttggcgttcttctccagcggactctcacccataatcagggtttcgactccccgtgccgacgccgatgccgcagcattggtatggatcgaaatgaacaggtcgccgcccgccttgttggcgatatcggcccgagcctgcaaatcctgggtcagactttcggaaaactgcttgtccgtcttacgcgtgtaaaccactttcaactgggggatctccttctcgatcaaggccccgagcttcagagcgatctgaaggttgagatctttctcataaactcctctgtaatgagctcccggaaacttcggccccccgtgcccggcatcgattacgacgacccgcacgccctgtgcaatattctgcgcagcaactccgttgaaagagagtgtcgcaatcaaaaacagggcaacaagaaaaagcgatttccgcatagcaaaagtggctgaaaatttaacggttctgaattttttacctatatttgccggatgttaaaacccccgcactgaggctttcggagccattttcgggcggttttgccgacttgtcggcaaaggtatgattttttttggaattttggacaggctaaaggcaaaatatatcttctcgggagcactcctgctgctcttcctgcttccggtgctcggcatggcgctgccgggcggagtgcagcatcccgcgacacccgaacgccaaacaccgcccgacagcactccgacacaagccgtacaaaaatcccgccgcgaaacccgccgggagattcggcgccttcaacgggaagccgaccgccccccgaccgccgaaacacgtacggaagaggagcaggattcgcttttcgacaccaagatcgactcgatcttcggagcgcctcccctctcgccgatcgcccccgccgacagtacggctcccaccggcaacgactcgctgctgcgcgattcgttgcgtcaggacacgacccggcgcgatacgacccggaaaaaatctttcctggacgacatcatcagcggcaaaaaccaggactcgctctactacgacgtacgcaaccgcacggtctatatctacaaccagggcgatatcaactaccagaacatgaatctcaagggagatttcatgcgggtcaatatggacgaaaagatcatctacgcccacggcaagcgcgacacgatagacggcaaaccgacagttaccaaccccactttcaccgaaggagccgccaatccctacacgatggacacgatcacctacaacatcggcagtaaaaaggcgaaaatcaaaggcgtggcgactcaggagggcgacggctggctgatcggcaacaacgtcaaaaagatggacgacaacaccatccacatccaggacggcaaatacaccacctgcgaccagacggaccacccccacttctacctggcgatgaccaaggcgaaggtgattcccggcaagaaagtggtcacgggtcccgcctacctggtcctggaagacgttcccatctactttccgctgctgcccgagggtttcttcccgctcagttccggccccaagtcgggtctgctgatgccgactttcggcgaggaatcgaccaagggattctacattcgtgacctgggctactacttcacgctcggagagcacatggacctggccatccggggcggtatctacactctcggatcgtgggaggcatccgcgatgtcgcgctatatgaagcgttacaagtacaacggcaccctgaatttcaactactcgaacgtccgtgtcggcgacaagggcgaacccgacttcctccagcagaacaacttccagctctactggcagcatacgcaagaccccaaagccaatccgggatcgaccttctccgcttcggtcgatttccgtaccagcggctacaaccgctattcggctaccagcctgaacgaagcgctccagacgcagacaagttcgacgatctcctattcgaaaagctggctcggcaccccgttctccctttcggccaacatgtccgtttcgcagaactcgcagagcggaacgctctcgatcgccctgccgaacgtcgtcttcaacgtttcgaccttctaccccttcaaacgcaaggaggcgatgggcaagcagcggtggtacgaaaagatttcgctccgctacaccggcaagttcaacaacaaggccaacgccaaagagtccgaaatcttcaccaaggaaacactccagaacatgcagtacggcttcgagcatagcattcccatctcggcgacgtacaacatcttcaactatatcaacttcggacctacgatcaactacaccgaaaagtggtatttcaaaaaacaggagcaggtttggaacccggtgctgaaccgcatcgacaaactcgacccggagtacgggttctaccgtctgtacaactacaacttcagcctgcaggcctcgacgatcatctatggccgctacgaggccaagaagaaaacgcgcaaggtacaggcgatccgccacacgatcaccccgacggtgagcttctcctacgcccccgacttctccaagcagaaatacggctacgtaaagaccgtgcagagcgatacgctgggtaatttcaagacctactcgcctttcgaagggagcatcttcggcgtgcccagctccggtcagtccatggccatcaacgcctcgctctcgcagacgctcgaaatgaaggtgctcagcaaacgcgatacctcgggtatgaagaagatcaaactgatcgacgaactccgcatcggacaggtatcctataacttcctggccgactccatgggactttcgaacatccccatttcgctgcgcacgaccgttttccaaaatttcggcatcaatatcaacgctacgctcgacccttaccgggtcaccccgcagggccagcgtatcaacaaactctttttcccgggccgtgtggtatcggccagcacttcgttcggctatacgttccaatcccgccaggacaactccaccccggcgatcaacgacatcaacagcgccccggtcgatccggcctacgccaatcctttctacgacccttacgggcaaatgaacccggccctgcgacggcaatacatgacccaggcctactacgacttctcgctaccctggaacctgggattcaactatacggtcagctactccgcatcaccgaccaacaacggcacgacgggctaccagaaaaacatcacccaaacgctcggcatcaacggcagcgttacgatcctacccaagatgggcataacattccaaggcggttacgacttccaggccaaggagctgactccggcctccatcaccatttcgcgcgacctgcattgctggcaaatgtcgttcgcgtgggtccccttcggccactatcagagctggagtttcaacatcggcgtcaaagcggcttccctcgccgacctgaaatacgacaaaagccagagcatgttcgacaatttatactaaatttcggacgctttcacgcataatccgcatcgaaatatgaagattcgatgaattttggattctttcttgttccttaattgaatattgtctatatttgtggtagcccataaccaggacacgatgtaaaaactctcaaacataatacctctatgattatgaaaaaacactacgaatctacggttaaggggggggggaacttcgtactccgctccttcggttgagatcctcagcatctcgatcgagaaaggttttgccaacagcactgtcctggactatggcggagccggcgaagcaggcggcagcgttaatgacaccgattacggagaatactaacaaacacatcctacgactatgaaaacttttttcaaatccattttggctgtcgcagtgtgtgcatctctgttcgcagcctgttccaaagacgacacggtttccgacccgtcgaacggtcgtaaagtaacgatgacggtcaccgcatcgtctgaactcgaatcggcatccggttcccgtacgacgtatgatcccctgacggggaaaatctcgtggaacgaaaccggcgaataccttcaggtgttcgaaacggccgcctccaaaaccacatacgccaactcgcaggaaggtacggtaagcgacggcacggcgaaattcgccgtatcgttcccggagaatacgaacactccgctcgtttataacgcggtttatcccgcctcggcatggattacgtccaacaatacggatattaccaacatgaaagtcgtcacacgcacatctcaacagccgaccgctacgagcttcgattcgaacgcggacctgctgatcgccaaatcgatctcgctggagagtcagccgaccgaactgcaaatgagtttcggccgtgccgttgccatcggtaagatgacggtcaaaaacctcgcatcggaggagcctgtccttggcgtcgaattcacggctccagataagaaggtcacgggccgtagctatgtcgatatgacggcaggcaccgtcaaggagtacggttatcccggtaatttctcggacaacgtgacgctgagctactcttcggagatgaaccttacggccaacggcgcaacgggcatgaccgcctatttcacctgcttcccgttcgaggtggcagccggtgaaacattcaccgttaccgtgaccaccgcatcgaagatcttcaccaagacggtaaccgttcaggagggccggcccctggctttcgcagcaggcgacagttcgactttcgcggtcgatatgaccgacgctgcggaagaggcgaccgaaacattgagcggcgactacgtcatcacggcgacccaatccgaaataacctatgcaatgagttctctggctgacggttctcgtttggcccccgtagtaattacaccgtcaaatccctacaaaacgggtgatgaaaccctcatttggacaatcaccaaatcgggcgacaactacacgatcagtcaaggcgagaactatctctcctgggagagcgacaacagcgctacgacctctacgactccttatgaactggtaattaccaagaacaagtccgaaggtacttaccaaatcgcatcggcagcgaccccttcccgtattttggcgaaaaacgatcaagcagctctcggttttggattctataccggcagtcagacaaaagatctgaccctaatccctgccgaatacgtcaagttgcctgaaatcacgttggatcagacgaccctgacactgtcttataacgatacggaaactcactatatccccgttacgttgaagaacgccgaaacgcaagacgtttccgtcgctatttacgacggcactgaaggaaccgaacagccggactggatcaccacaggtgattacaacggcagcgaaaatcgcctcgaagtcgcagccacagaaaatacggtcgcaacacctcgtacagcacgcatcgttcttaccgccactacttcactgggtacagcccaagcgacgctgactgttgagcaggctgctgccggcgcaaaggcatgggtttcggaaactttcgagaactataaacccgatgcaggatcagcctacaactctaatggaactttcaacggcgtaacaaccgggactccggtatggacctatgcaaaatgtggtaatccgaaccaatccaaaaccgaccgtactacattgtccaacacggcagggatcacagtttccagcgaaacttacctcacgataggtaagagcggttcattgagcgtaacaatccctggcggaatcacagcactcaagttcaacgccttgacaagttcgaaaggcagtgcaaccttgaccgtaacagtcggaggaaaaagcgtaggaacattaagtataaccaaaaattcaaaaaaagttttcgagctctcggatatagtatgcaacgggcaggacgcaacgatcaagatcgagcaaaacacggaaaaccgtactactatcggtgatttctcttggcagcttgagtgaacaggaggcggagttccgactccagaccctaccccgggaattgctacaccgagcgtaagcgacataacttcgagtacagcgaaggtttccagtagtctgaccgacgccgcttacgcaaccgaggtgcagttcttctattccgcaacgaacggcagcgacacgggaagtgtcgttgccgctgttgtcggaaacgaagcgaccgccaacctctccgatcttctgcccgcaacgacgtacacggtttacggcgtcgtaacggcgaccaacggctccacgccgcagagttcttcgacaacctttaccaccgaaggagcacggacggatcatgccgcctggtacgagcttccggccaaggacaacgcaggcagcaatatgctgctgcggaccttttacgacacggcacgcaactacacgatgtattacgacacctcgacctacacggcctactgggtagcttacccgttggcggccggtgacctgggatcgggacgtccgaacgatccgtgggctgcgacacccgggattccgacctcgcaacaaatcaatgtctgggccggatcgtacggagtgaacgtaggttccacctcgaacatctaccctcgcggccaccagatcccgaacgccgaccgcaacaaggatccctatggcaccatgtgtgcgcagacgttctacgctacgaattccacgccgcagattcagaacgggttcaactccggcatctggagtacgctcgaaggtgacgtgcggacgctcgcacaacaacagaccgatacggtttacgtggttacgggcgccatcctacggactgtaaccgggaatgaaacgatcacatatatcaaaccggccaaggataccaagaactgtcccgtaccgaactactattacaaggtactgctcaaagtcaaaagagaggcttcgggcaagatctcttcggcatcgacggtcggtgtatggctgcctcaccgcgtctattcgggcgaaagctaccagagctacaccaaatcggtcgccgaaatagaagcgctgaccggatataatttcttcgccaacctgcctgccgacatccaggccgcagcggagcaaaattcgaactggagtacattcgcatcgttctaaacgggcgaaaaaacctccgatacgacaaaacgacacgcatcattccattcgatgcgtgtcgttttgtattatccatacatccgaacggctcattcttccgaaaaaacagttatctttacgaatcggaaaaccgccgaatccgaaaaccgacactcgaagcggatgcaacgaagaggcgggaatattctgtcgcatccgaaggaggcaaaccgcaaatatccgatcgacgaggcccgtgattgtccacgaggtcccgccgaacgcagaaaacgaaaaaaacacaaagtcaaagcccggttctccgtccatttcccgcgatccggctccgttatgctacgactcaagtccgaaaacctccggtcgaaactccggcgcatgcccatgctccgcgcattgccgccgctcacggccggcatcctgctggccgaccactacgtactgccgctgtggttgttagtaggcggattcctcgtctgcggtatcctggcattgctcgccgacgaccggggcgcaaacctcgccaccctgggagccattctgcttttcggcatgaccgtcaccgaactgggacacactcccgctccgccgaccggcactccgggcgaatacgaaatcgtcgtccgggaacgcctctccgaacgggaaggcaaaacggcctccggcgcatcgctccgcgccctgcggaactccgaaaccggagaatggctccccgccgccggaaacctcgtggttcgatgcgactcttcgaccgtgctgaatcccggcgaccgagccgtcgtacgcggcaaaatctaccctttcaccgcccgtcacggcggctacggacggctgatgacccgccggggatacgtcggcaccctctacctgaaccgctcaagcctgctgctgcgcgacaccctgcaccgggagcttcccccgaagcatctctccctgttcctgcacgaacgggccgtcgcacggctcgaccgtctgtccctggcgcccgacgaacaggccctctgcaacgctatgacggccggggatcgacgctcgctctcccctgcactccgtgcggcctactcgcgcagcgggacctcgcacctgctcgccgtttcgggattgcacgtgggcatcgtctttctgctcgccaacctgctgctctggtggctgccgctcttccggcacggacacatcctgcgcaatatcgcggtcatcctgctcatctggctctatgccgccacgacgggattcccgcccagcgtcgtccgggccgcgctgatgttctccgtcctgcaattcgccctggcctcgtcgtcggaatacgtcgggatgaacacactcgccggcgtagccttcgtcatgctgctcttccatcccgattacctgttcgacatcagcttccaactctcgttcatcgccgtcgccggcatcatcgcctggggactccccctctgccgcctcctgcgaacacgccgcaaaagcatcgatatgctgaccgcaaccctcgccatcggattttcagcgtccgctgcgactgcacctcttatctcccataccttcggccagatctcggtcgtcgggctggcactcaaccccgtcgtcatcctgctctcctacgtcgtggtcgggagctgcacgctctggctcgtgatcccgggaacagtgctcgcaccgctcttctcggacgtcgcaggattcgcagcccgggcacagaacgaactgatccgagctgcagcggcacttccggcagccgccctcgacatccggctcacgacgacccaatgctggatcgtttacggacttttcatcttcgcaaccctgctcctatggagcgccgaacggaaaaaatcggtatcttcgctcccggaatgatgactccggaacaataccgactgctgctgactcccgaagtgcggcataccgtcgaggaacaaatcggccgcgaccctgcggcgatcgccctcgacaagcgtattccgcatgcggcactcgtcgccacgcaggtcaaataccttgcgcgggcacggacgaaactcccctcctactatgaagcccgctgcatcctcccgccgctggctttcgaacaggcctcgagcgaggcatgcgcggcccgcaaaagttgcagcggaaacacggtgctcgaccttacctgcggactgggcgtcgatgccctctacctctcaaaacgcttccgcgaagtcatcaccctcgaacgggatgcgacgctggcggccgtcgccgaagagaatttccggcggctgggcgcaacgaacatacgggttatcaactcctccgccgaggcgttcctcgcctcgaccctggaccacttcgactggatctacgccgaccccgaccgtcgcagcgccggagggcgcaagctggtgcggctggaggattgttcgcccgacataccgaagctgctgccggaactccgtcgcatcgccccgaacctctgcgtcaagaactccccgctgttcgacgtcggcgaaacattccggctcttcggtccctgccgcacggaagtggtgtccctgcacgacgaatgcaaggaagtcgtcgtctatgccgacggaaccggccccctgctgacggccgttgcgctcgaactgggagaattttcctgcacgccggccgaagcccgtgcaactccctgcgacaagcccttcgatccggccgcttaccgctggctgctgatccccgacgtagcgcttcaaaaagcccggctgacgccgacctacctgcaaggccgcgccgacatctggagcccgaacggttacggattcgcagcggaaaagtccgaagacacattgggccgctggctggagatcgaacggatcgagccctacaaccccaagcaactgaaacgggagctttccggcagccggctgacgattctgaaacaggatttcccgctcacggcggctgaaatcgccgcacggctcggcatacgcgaaggcggcgagcgacggatcgccttcacgaaactcgggcaggattattggacaatccgtctaaaatagctacctttgagaaacgtcccgaaatgaaagtcaagaacgtcttcacctacttcacggacacgatcctgcggcgcaacgcaaactcctaccgcaatccccgcgtccggtgggccgtcagacagtacaagctgctgttctacacggcacgcggcctgatcgcccacgatacgatcgtgcgcagcgccgccctgacgttctatacgctcatctcgatcgtcccgatcctggcgctggtattcgccgtagtcaagggattcgggcttctggacggcctgatcgacgatctctacgcccttttcccgcaaaacgtcgaagtattggactacatggtggaattcgcccgcaaagccctcgccaatacgcagggcgggcttatcgccctggtcagcgtcgtaacccttttctgggccgtcatccgggttttcgggtcggtggagagcgctttcaacaacatctgggaggttcagtcctcgcgcaatatcgcccgccaatacctcaactacatcgtcatcgcgatggtcgccccgatcctctggctcgtggccagcacgatgggaggttatctgctccggttcttcgacgcggggaatacgttcctcggcatccttctttcgaaactttcggccctggtcatcatctggggcagcttcaccctgatctatgccgtcgtgcccaatacgaaagtcttgtggcgcagcgctttcatggcgggtatcgtcgcaggaacggtcttcatgctctttcagtggggctacctctatctgcaaggatggatgacctcctacaacgcgatttacggcagtttcgcagccctgccgctcttcctgttatggctgcaaatctcgtgggaaatcctgctcttcggcggcgaactctcgttcgcctaccagaatatcgaccgtttcgccgaagagcgcgaatcgctcggcatcagcaacgaccgacgacgccggatcatcctggccgtcatgctccaggtcgtacaccgctttcgggaaaacgaaggggcgctcccggtcgatgaactccgccgccgactctcgctgcccacccgcatcgtgaacgatgtcctgcaccagctcgtgcgcacgggcctgctgatcgaaatccggaatccggacgacgaccgcgaagtggctttcgcccccggacgggacatccacgaaatgacgctctacaacattttcagaaccatcgacaattacagttcgacacgcctctacttcgccgcgaccgaagaaacgcgccgaatagaccgcgcgctcgacgagcttcagacggcctgccgtacagcgggcgaccggcttcggctcatcgacctggacgacgcagtgaacgccgcccgcaaaccggcttccgggccgcagcccgaatcgaaacactcggaaagatgaaaaatatcgtcctcataggcagcggcaacctggccgaagcgctcgcccgcgcgataagccgcacggaaggagcaacattgctccagatcttcgcccgcaacgcgaaacgaggtacagcactcgccctcgaaaacggcaccgcgtggagctccgatccgcgcgagctggccgccgcagacctctacatcctggccgtcagcgatgcggcgatcaccacgctggccgaaagcctgcccatacccgccgaagccgctgtggtacatacggccggaggcatcggaatagaggctcttcccgcacgcttcgaccgtcggggcgttctctatcccctgcaaacctttacccaaggccgcagcgtggattttgccaaaatacctcttttcgtcgaaggaaacgacgactccttcacctcggagctcgaagcgttcgcccgcaatctgagccgcacggtatatcgtgccgactccgaccgtcgcgtacgccttcacctggccgcggttttcgcctgcaatttcgtcaatcacctctacgcattgggaggcgagattttgcacgggaccgaactgcccttcgacgtactgaaacccctgatcgccgaaaccgcagccaaagccgtcgattcgggcgatccgcatcgggtgcagaccgggcctgccgtacgcggcgacctgccgacgttgcggcggcacgaagccgcactcgctcacgatccgcgactgttacgaatttatgaatcattaagtcaagatatatgggaaacttcaaagaagacatcgtaaagaccgaagcgttcattttcgacgtggacggcgtaatgaccgacgggggaatcatgcccctggtcgatggggatttcatccgaaaatactatgccaaggacggctatgccatcgcctatgcgctccgtatgggctacaaagtgtgcatcatcacgggcggacggggcgcaacgctcgaccaccggctcaaaatgctgggaatcacagatgtttacctggactgcatggacaaaatatcggccatgcaggatttcttcgcacgccacggactcgatccggcgaacgtcatctacatgggcgacgacatcccggacctggagtgtatgaaggcagtcggaatccccgtctgtccctcggatgccgcgtccgaggtgatcgaagcctcgcgctacgtttcggagttcgcgggcgggcacggctgcgtgcgcgacatcatcgaacaggtactccgcgccaggggcgactgggcccgcgattcccggggcatgcacagctcgaatatcgccgcgtcgcggtaaaaccaaaaagcaacgaaaggggctgtctaaaactgttagacagcccctttttcatttttcagaaacagcaggaattaaccacaatcgaaccctcttcctccgggaaacagttcccgtgatcggacacattcctcggttccaagaatttatttttactcaagtccaaagaggacaaccggttattgcaacaatacagctttctcaaaatcggatttcccgaaagatccaacgtagtcaattggttgtcattacaccacaacgtttccaacaccgaattatgcgacacatccaacgtagtaagcaaattttcaccacacgacagccaatttaacgaccggttgtgggatacatctaacgaggagagcgagttcctgtcgcacgaaatccatgtcagagccttgcaacgagatacgtccagtcggctcaatttattcatgggacaatccaattccttcaaattcggaacagcgccgagattcagacgctccaattcatttctactgcaattcaaatatatcaaatcccggttccgactgacatccaaggttttcagccaacagcccgagcattccaacgtgtcgagtttggtatttttactaacatccagggtttccaaacggttctttttgacaaaaccatttccgcacataagttttttcagttccaaattatgcgacacatccaaactcgacagactgttttccgtgcacaccaactctttcaacaggggattaccagtcacatccaacgctttcaacgagcgattaaatgcacaatgcaaaacagtcagcttcggattccgatccgtttccaatgccaccagctcattcaacatgcaccgtaactccattagcaccgaattatggcttacatccaaggatttaagacaatttcccgaacaatccaactttaccaaacgaggattctgcgtcaaatccaacgtcgatatcatattcatacagcaattcaactcctccaacagcgggaaatactcgattcctgctaaggaagcgataccccgcctcgaacaatctatcttcgtcgcagcccgaccggcaggtgttactacgacccggctcccgttttcgccgatctcttcgatatacccctgttccaaaagataagcccggaaattgggatcgggaatcatgtattgcagatacgccgggcgaacaatcgtatccgccgcacggtatatccgaccttttttcaatcttacggggaatttgccaccgcattgaatcctgaacatattcccgctgtcacgatccgtcacgaccgttaacgaataccctcggcgaaactccacaggcagtacaggcagataaaaagaggtcgattcttccgtcagctccacccccgatccgcaatccaatacgacgcaaggactgactttcctctcttcgcacacactgtcgggcagctcctgcctactggctaccaccttgatcgatcctgccagaatttcaccgtcgtttccctgcaaaataacttgtttcaccttaatcggttcgagagcgaagctgtctttcctcaatcgcaactccacagcggagaacatattttcgaaatcgagtgtcatttcagccagatttccccggtaccggccgagcataggcacgctccggcaccccttctcatcatactgcgccacaccgaccggaagaaaaaaactcccgtcctcttgtaacgcaaatccatacggtcgccaagctacgaccgaaacaggatcctcgatccgctctttcggccacatctctttcatcaaatcctccgtcgaataggttattcgaccgtcagcagcctgcatagcaaacaccggcctcgatgtgaaagacgatttaataaagtccaaatagctattatcctgaattaagaagccgattccatcctcttcgttccatacgaacttctcgaccgcaccatcgatgccgatcgtatccaaggcgatacatccggcctgatcgtttcccgatgtgttcgacactccattcgtcttcgtcgtcgaagctccggagcatgcctgcagcaaaaaacagataaaaaaagacactaccaatcttgtacgcatacaaacttctcttttctctataaaattacaatttttcgagaaattccgcatccataaacaaaaaaattacaccgaaaaggcgtaattttatcaaaataagacatccgacccgggaaaatccggctcgactacacttcccatcttttcccgatacgcgagagatgctcctgcaggcggaggcggaaatgttcccggcgctgcttgaggttttcacgccacccctgccaacgcatataacgctgttttttctcgggataaatgtccggaatggtcagcagaatacccgtctcctccacaccgccgaaatcggtgttgattaccgtatcgaacacccgcatcgtaggcgagagattcatataggcattgatcagcggaggaatgttctcgttgaactcgcggatgcgctggatcaggatacggtaattctcctcataggtcttgcccgtgaaaaaatgctcgtaatagggatcgtccaaatcgagctgcacgggatttttacccgccaccagatgatcgggatcgggaaaataacggcgcaggaaccagatcagggcattgcgtgccatagccttgtacgaagcgtacatcgtcaccttgccgaaaaggtatttcaccttgggattcagcaccacaagcgcccccaaaccgtcccagaggttgtccagcgcatagatactcttcgaattgccgcgcgactgataggaaggctgtacgaacgaacgccccagttcgatggtatagggcaggtattccttgcggaatttgtcgctgaaggtgaaataatgttcagtggaaagatgccggggattttccgacgtgcagacgataaagcgataaccgcccacgatctcctgctccgcagggtcccagacgatcaactggtaataaccgtcgccggcgagatcctcctcgtctatatccacggcgagccccgttccgccccccgccgaccggaaggcgacctcccgcaggcgtccgatctcccgcagcagggacaggcattcggcggcatcgaaaatatagatttcattcgaagccttgttcgtatttcggaccttgcattcaggggtcaattccgcgagcaacagacttcggcttacaggctctatgatgggttccatgctgttaaatttagagcaaaactaaacaatttatccgtgttttgcttcggcacgcaactttttttccaaagaatacgccttttcgcgtacgtaatccgcccgctgctgccacgatccgcattcgaccagctcgtccgtcgaaacaggctccccgaccagtatccggaaatgttttcccttctgcgaaaacatctcgtcgggcagatagagcatctcgatattgaaccggatacctatcttcctccgaaaattggaaaggcggtaaaagaaatcggatagttcgccctcgacgaaaaccggcacgatccggcgcccggacgccgccgcccgcttgacgaaattcgaacgccacggcaaatcggacaccaccccctgccgacggcgcgaacaaagcccggccgggaaggtcagaatcggacaatcgcttgcaaaagcttcgtcgaacctgcgcaggtattccccgcattgcgaaccgtgcttgttcaccgggatccagagcggtcgcagcggctcgacgtgcatcagcaaatcgttcacgatcacccgcgcatcgccgaaatatccgaccagctcgtcggccagcatcataccatccattcccccgaaaggatggttcgaggcaaagagataccgtcccttcgggtcgagcttttcgagcccttcgaccgaataggtcactccccagaacttaaaacaagcctggataaactgctgaggaggaagcgcggaatactcatccagaatatagttgatttcgtcctgatggatcgtgcgcttgagccagcggataacgaatcccggcacccatcgggcgatccggggagcctttgccgcaagcacggcatcgacatctattttcggcataacgtaacccttttaattatcggtcgaaagtcgtacgacgcccgatttgcacctatcgcacctacgctcggatttccaatcgaaactccgcatcggtacagggagatcccggaagcgggacaccccggccttccagagtacgaccgttctcaaccgttttttcttcggtaaagataacgatttttccctgcaaattgcctaactttacaccctaaatatatatcgaaaccaaatgacctccgtctatcatacgcccgtcctgctcgaagagtccgtccgactgctcgacatcgatcctgcaggaacctatgtcgatctcaccttcggcggtggcggacattcgcgccgcatcctgtcggcactgggcgaccggggacgtctttacgccttcgatcaggatcgggatacccgggacaactgtccggaagacagccgcttccattacgtcgaaagcaacttccgcttcatgcggggcgccctgcggctgcgcggagtaacccgggtcgatggtatcctggccgacctgggcgtgtcgtcccaccatttcgatgccgtcgaacggggattctcgttccggggttcggcaccgctcgacatgcggatgaaccagcgcggaggaggcacggcggccgacctggtgaacacgctcgacgccgatgccctgacccgcatcctgggcgattggggcgaaatagacaccccctggaaagtcgccgcctgcatcgtccgcgcacggaccgcgcagccgatcctgaccaccgcagacctggttgcggccgtagcgccctgtaccccgaaaaaggacgaatcgaaattcctgaccaagctgttccaggccctgcgcatcgaagtaaacggagaaatggaagcgctcaaaatggcgctggaacagagcctcaaggtgctgcgccccggcggacggctggtagtgatctcctaccactcgctcgaagaccggctggtgaagaacttcctgcgcagcggtaatttcgaggggcgcatcgaaaaggatttcttcggcaagcccgaaacgccgttcgaaatcattacgcgcaaggccgtcactccctcctcggaagagctcgtccgcaacccgcgttcgcgctcggccaaactgcgagccgctgccaaaatcgtacgccaataaccgtttccgaccgacatgaaatacaacgaccacgaattcgaccccgtcaccgacgaggagcgtgccgcccgggagcgggaagaagagctcgcccgccgcatccggcgcgaagtgctgcgcgtgcagagcggcgaagccgacgaggaaattcgtgccgaccgggagcgggagcaggccgaagaggaggcccggcaggaggagcagcgcaaggaggagcgccgccgctcgaacatcttctggctcctcttttcgggcaatattctggttcggaaaggagcctcggaatactatcgttacatgatttgcatcgccgcgatgtttttcgtcagcatcttcgtaatgttcacggcgctgcacctcgacatgaaatactcgcggctttaccgcgaggtccagatgctgcgcgagcgctcgacgcgccttcaggagcagcgtttccgccatacgacccactcggccatcctcgaagagctgcgccgacggggcatcgacttgtacgacccggtcgttccgggtgaaattctcgacgactgatgagcaagatgaaaccggaaaaatcgcgcatcaaaagcgacatcctgctgcgggtgaggttgctctacatcctcttcatcctggcgggactgctcatcttcgcacgtctggtatgggtgcagctcttcagctcggaggtcgcctacaatgccgaacggctcgccggacgcatcttcaccgaacagatcatcccggcccagcggggcaacatcctcacgcgggacggagatccgctggccacctcgatcttccgctaccgcgtcgaattcgatttcggcagcccggggctcgactccgtgcgtacgttccacgaacagagcgactcgctgtccaaactacttgccgcctatttcggcgacagatccgcagccgaataccgtcgcatgttccgcacgcagcatgccaaacactaccaggtaaaataccgcaaggacaccctcgttccccgctccgaaggacgcatcgcccgctggatcgaccggattttggaccgggaattcgtgccgaaaaaactctacgataccctgcgcgaccacactcccgtccaaatctttccccgcgacatcgactacaccgaatgggaaaccctgcgcaaatacccgctcctgaactggaacatgggcatggtttacaacctgcgtgaaagcgacgaacgcatctatccgcagggcgaactggggcgccgcacgatcggactgaccggcgaccgaggcaactacggcatcgaggccgtctatcgcgaagagttggccggccgcgacggtcgggccacgcgccaacgcatcgcccggggtttttacggccgcgtcgtggacggcgacaacatcgacccgatcgacggactggacgtggtcacgacgctcgatctcgatgtgcaggacgtggcgaaccgttacctgcgcgaacagctcgaagcccagaacgccatctggggtaccacgatcgtgatggaggtccgcacgggcgaaatcctcgccctcgtgaatctgggccgcacccccggcggcggatacgccgagcgggagaactacgccatcgggcgtaacacggagccgggctcgaccttcaagctggcttcgatgctgctgttgctggacgacgcggatatgccgctggaccagacctacgacacgggcaacggacgtgtggtgaaggtcggcggcatccgggtgcaggattcgcacgccggattcaacgacatggatttccgcacggcggtcgcccagtcgtcgaacgtctatttcgccaaggcgatctgggagcgttatgccgacaacaaggagcgttacagcgacttcatgaaaaagctgcacctcgaccaaaccgtcggactggaggctttcggcgagaaaaaaccgctctttcaggattggaaggaggtgcccgaccccaacagtatgctcgtacgccgctcgttcggctatcgtatcaaactctccccgatccaggtcatcaccctctacaacaccattgccaacgacggcaaaatgatctctccgatcctggttcgggagctgcgccggggcgacgacgtggtcgaacatttcaaggcccgaacgctcgtggacaagatatgctccgaacgcacgctgcgcgaggtccgcaaacttctcgaaagcgtcggcacggaaggtacgggtgctggatttttccgcgacacgaccctctacaccgtagcggccaagaccggtacggcccaatacgccgacgacaagatcggctaccgcgacggctactacatcggcagcatggtcgcctacttcccggctcacaacccccgctacacggtgctcacgacgatccacaccaaacggcaggccggcaaatcctattacggcggcccgctctcgggtccggtggtcaagaaggtcgtcacctacctctacaaccgggagcacgactgggatctctcgccggaaaattcaggggaaaaacactatccccggcgaatcaaaggcggcgacatcgcccaaatccgccgcatcgccgacaaattctcgccccgcacctcgttcgaagaccgcaaaggctggggaacggtacggatcgactccctctcgaacgtcacgatctcgacgctcgcacaggacgaccaaacgatgcccaacgtcgtaggcatgggactcaaagacgccctgttcctgctcgaaagccggggcctcagagtttccttctcgggacgaggctccgtccgataccaaagcatcgctcccggcacgcggatctcgcgcgggggagccgtaaccataacactcaaataaagagatgaaacaaattcaagaattaatcaaggcgacacaggtgctccgcgtggaaggcaactccgatacacgtgtgagcagactggcgtatgactcccgccgcatcgctcccggggactgcttcttcgccgtgagcggcacccaaagcgacgggcacgcctatatcgatgcggccgtcgccgccggagcggtcgccgttgtctgccagcggctgcccgaacacctcgccccgtcggtctgctacgtcgtcgtagcggataccaacgccgcgatggccgacatggccgccgcattctacggcgacccgagccgtcagctcaaactggtcggcatcacgggcaccaacggcaaaaccaccaccgtcaccctgctctacgacctcttccggggcttgggctacaaggtcggtctgatctcgacggtcgtttaccgcatcgacaccgaacgcatcgaatcgacccacaccacgcccgacgccatccggctgaacgagatgatggcccgcatggtcgaagccgggtgcgaatactgcttcatggaggtttcctcgcacgccatcgtgcaggaacgcatccggggactgcatttcacgggcggcatcttctcgaacatcacccacgaccatctggactaccacaagactttcgccgaatatatccgggcaaaaaaactcttcttcgacaatctcccgaaagaggctttcgcactgataaacatcgacgatcgcaacggccgggtcatggtgcagaacacgcgggcgaccgtcaagaccctctcgctgcaatcgatggccgacttccgatgcaagatcctcgaaacacaccccgacggtatggaactgcgcatcgacggacgtgaagtatgggtccatttcctcggccgcttcaatgcttacaacctgctctgcgtctatgctgcggccctgctgctgggcgccgaccgcgaagaggtgctccaaatcatgagcacgctgcatcccgtaagcggacgtttcgagttcgtgcgagccgccgacggcactacggcgatcgtcgattacgcccatacgcccgacgctctggaaaaagtgctccagaccgtcgaggagatccgccgcccgggacaacagctcttcgtgctgtgcggctgcggcggcgaccgggacaagaccaaacgccccgaaatggcgcagatcgccgtaaaatacgcgaccaccgcaatcctcacttcggacaacccccgccacgaagatcccgacgcgatcctcgacgacatggtcgcaggactcgccccgggtgaccgctacctgcggatcgccgaccgcgccgaagccattcgcacggccgcgatgctcgccaagccgggcgacatcctcctgctggccggcaagggacacgaaacgtatcagatcgtcggcgacgtaaaaaaccatttcgacgacaaggaggaggctctccgtgccttcgccctctacgctaaaaattaacctgcgacatgctctatcatcttttcaaatatttcgacaacgttcacaacctgcccggcgcaggtatgttccagtacatttcgttccgcgcggcggcagccatcatcatcgccctgctgatcgtcatcgtcttcggacgcaacatcatcaacttcctgcgccgcaaacagatcggtgaggagatccgcgatctggggctcgaaggacaactccagaagaaaggcacgcccacgatgggcggcgtaatcatcctgctggccattctcatccccgtactgcttttcggacagctcgacaacgtctatatccaactgatgctggtttcgacgatctggctggggctgatcggctttctggacgactacatcaaagtcttccgccaccacaaagaggggctcaaagggcgtttcaagatcgtgggacaggtcggcctgggcattatcgtaggtacgaccatgtgcttctcgcccgacatcgtcgtccgggaaaagacgaccgaaccggtcgaaacgatctacctcgacgaacacggccgaaccatcgccgaccacatccagcggcgcatcgtcagctccgagagccgtcagacgacccagaccacgattcccttcgtcaaggacaacgaattcgattacagctggctcacgggcggcaaccgcaccctcacttggattctctacgtcgtcgtggcgatcctggtggtcacggccgtttcgaacggcgccaacctcacggacggactcgacggcctggtgacgggggtatcggccccgatcgtactggtgctgggcatcctggcctatctctccggacacatcgtctatgccgactacctgaacatcatgtacattccgggcagcggcgaactggtcgtcttcgcagcggcgctggccggtgcgctggtcggcttcctctggtacaacagcttcccggcacagatcttcatgggcgataccggctcgctctccatcggcggcatcatcgccgtcttcgctctctgcatccgcaaggagctgctgctgccccttctctgcggcatcttcctggtcgagagcctctcggtcatgcttcaggtgagctacttcaaatacaccaaacgcaaatacggcgaaggacgccgcattctgctcatgtcccccctgcaccatcactaccagaaacagggtttcttcgaaaccaagatcgtcacccgtttctggatcgtgtcgctgctgctggcggccattaccctggtaacgcttaaaatccgataaccccatgaaaaaaatagttgtcctgggcggcggcatcagcggctacggctccgcgatcctcgccaagaagaaaggattcgacgttttcctctccgacaaggggcggatcgccgaccgctacaaagccaaactggaccagtggcaggtcccctacgaggaggggcaccactccgaagagcggatcctcgcggcggacgaggtcgtcaagtcgcccggcattccggacaaggcgccgctgatcgtcaaactccgcgaagcgggcattccggtcatctccgaaatggagttcgcgggccgctacctgggtaaggcccggacgatctgcgtcaccggctcgaacggcaagacgactactacgtcgctcatctacaagatcctgcgcgacgccggctacaacgtagccctcggcggcaacatcggcgagagtttcgcctactcggtcgctaccggcgattacgactggtacgtactggagttgagctcgttccagctcgacggcatgttccggttccgcgcccatatcggcgtgctgacgaacatcacgcccgaccatctcgaccgttacgactactgtttccagaactacgtggatgccaagatgcgtattacgcagaaccagaattcgcgcgacttcttcatctattcgggcgacgacgaggtgatctggcagcagttgcccaaatacgacctgcggatgaagcagctccccttcgcggccaaaaacgccgtggcgagcggcgcaggcgatgcgttcctcctggacggaaaatttaccgcgacggtcggccgggagtcggtggagatcgacacggccaaaatgcggattcccgggctgcacaacgcttataatgctatggcggcggcgctcgcggcgctcgcggccggagtatccccgacccgcatccgcagctccatctacgacttcgcgccggtggaacaccggctcgaacccgccggagagatcggcggcgtagcctacatcaacgactcgaaagccaccaacgtcgattccacgtggtacgcactggagagtatgaaacgtcccgtagtctggatcgcaggcggtacggacaaaggcaacgactacgagccgctcaagcggttcgcccgcgaaaaagtgcatacgctcgtctgcatgggcatcgacaaccgcaagctggtcgaaagtttcacgggcataattcccgaaatcatttcgaccgattcgctcgacgcggcgatgcaggcggcccgcaaagcttcccgtccgggcgacgtggtgttgctttcaccggcctgtgcgagcttcgacctcttcaaaaattacgaaaaccggggcgaactgttcaaacagtgggtcgccgaacacgcgaaataataagatggaagcggaaaaacagacggagaaaacggccggcaatccgaacacagagggtacgactgtgcagaccgacgcacccggacaggagcccggcatgaaactcttcgccggggacaaggtgctgtggatcattatcgcggcactggccgtcatttccgtactggtggtctattcctcgacggcgaagatggcctacgatgcgcatacggctcgttcgacggcccacttcctgcgccaacagctgctgatccttttcgtctgcgttccgctgatcatcatcgtacacaagatcaactcccggatatacaaccacctggcgctggtcgcctatgcaggcagcgttctgctgacgctggccgtctatttcatcggcgccacgaccaacggcgccgcccgctggattccgctcggtcctttccagttccagccttcggaagcactcaaggtcgccaccgtactgtttctggcccggcagctcgccggccggcagagcgtgatcgacaaattgcggatcatcccctcgctcaacccgctgcggtggaagcgccccgaccagcgcaaaatctggcgcgagggcacgtggcccatcctggcccccgtcctgctctcctgtgtagtgatcttcccggcccacacctcgtcggccgtgctggtcttcttcgcctcgtgggtgatgatgcttatcggacgggtgaggatcggtgaactgatgaaactgctgggcctggccttcgccgccgcaatgctggccggcctgctgaatctgggccgcagcgaaacggccggcggccgcgtggaaacctggatcgacctctggaccaagccccaaaccgaaaagccgatcgaccagctgaccgacaccgagcgttcgatgatcgccatccacaacggcggcatcctgggcgaaggcgccggacagagcgccatgcgcgtagagatgatccacccggaaagcgattacgcctacgcctttttcgtcgaggagtacggtatcgtcctggcgctgctgctgctgttgctctacctgtggatcttcttccgtgccatcgaaattttccgacggtgcggcacggcatttccgggtctgctggtcctgggattggccctgttgattacctgccaggcgctgctgcacatcatggtaacggtaaacctgattcccgaaacgggacaaaccctgccgctcatctcacgcggcggctcctcgacgatcttcacggctatcgccctgggcatgatcttgagcgtcagccgacagaacgacgaacaatcgcacgacatgcccaaatcggaaagcatctatgagaaatagtccgcgacacttccccaccgaaaccgccgttcccgagggatcgatgcaactaccgacctccggttcgaagaccgtcggacaacccgcagccgcacactaccggcttcggctctgttccgacatcctgccccgaatcgtcagcacaacggaaaatccgaatctgccggagccaccgagcctcccgacatcggattttgcccgtacgatataattgaaaaaacgaaatggaagcgatcagattagacaaatacctctgggccgtacgcatcttcaagacccgcagcgacgcggccgaagccatccgccagaaccgggtgctggtgaacgacgcctacgccaagccttcgcgcgaagtgcggatcggcgaccgaatcgccgtcaaacggatgcccgtgacctatctcttcgaagtcgtgggctacgtgtcgagccgccagccggccaagaacgtccccgactactgtcgcaacatcactccgcaatcggaactcgacaagctcaacatcccccgcgaaacggtcttcgtcttccgcgaccggggtacgggacgtccaaccaaaaaggagcggcgcgagctggacagccttatggaggagatatatttggaagaagaggaagagtaaccaaagaaatataatacttatcggacaataattccattcaaacgaacttttttttcacaataatgttatttttgcagtatgggaaacggcagaaaccttcaacttaaataaaaataccattatgaaaaaaatctttacgtttttaatcggtttgtccctgtggaccttgactgcgacggcacaagaaccggtccccgaaacgacctctcccgttgcgacggaaacggattcgctgcagcgggtcgtcgatgacctctcccagcaattacggcaccaaaagaacgaggagctcgatcgcaaaatatggaaaaacaggtccaagtacttcaacctcggttacgtaaaacaatcgctcgtattcaaggatttcggcgacgagaagctgaaaaacgatttcggcgtgtcgatcagttggggtaaaacctattttacctgcacaaaaaaccgttgctcggaatgttgaaattcggtctggactggagctgggtcgatctgaactattcgaaatacacgatctccgaatcggaagagccgggttcgggttccgtcggcgacattatggatgaaacgatcgacatcggcaatcatcagctggaatacggcatgcaggtcggtccttcgattacgatcaacccggttcacgaactgaaaatcagcctctatttccgactcacgccctcctactcgatgatgtacctcgacgatagtttcaactccaacttcgccctgttctacagcttcggcggatcggtggcctggaaagtgatttcggtcggcgtggaaggtcgctggggccaggccaaatacaatggattctcactcgaagatgcagacctggagggcatctcatcgaccaaaacgaaactgaaaaccaactccgtccgtttctacgtcggattccgcttctaaaaagcgccgaccgcaataacgaagaaacgcgccgctgaatatcagcggcgcgttctttgtgttgagctacctggattcgaaccaagaataacaggaccagaatctgttgtgttaccattacaccatagctcaatgtcctttcggtgatgcaaaagtagaactttatttttcaactgcaaagaaaattccgaaaaaaatttatacttttgttcataacccctttcgggaaaaacggcctgcaaaagtaaaacaacacataaatcaaccaattatgggaatcaaattccgtcttatcgtcatgaacttcctgcagtacgcgatctggggttcgtggctcatttcgctgggcgcctacctcggcggaggtcttcagttcacagggttgcaaatcggcagtttcttcgctacgatgggtatcgcatcgctcttcatgccggccctcatgggcatcatcgccgaccgctggatccccgcgcagaagctgctgggcatctgccagctcatcagcgccgggttcctcgtcgcagccgcctcgcaaaccgcctacggccccctgtacacctgcatgttgatgagcgtcatgttctacatgcccaccatcgccctctcgaactcggtggcctacaatgccctcgacctggcgaaactcgatgccgtgaagcacttcccgcccatccgggtctggggtacggtcggcttcatcgccgccatgtggttcgtcgatctggttcagataggcggcgtacagatcaaactgacctattggcaactgtacgtttcggccatcctctccctgattctcgcgatctactccttcacgctgccgggctgtccggtcagtcatgcccggaaaagccagtcgtggatcgacacgctcggactccgcgcattcgctctcttcaaggagaaacgcatggcgatcttcttcatcttctcgatgctgctgggcgccgctcttcagattaccaatgccttcggcgacagttatatccagaacttcggcacgatgccccaatacgccgactcgcccatcgtgcgccactcggtaatcctgctctcgctctcgcaaatgtccgaaacattctgcatcctgctgattcccttcttcctgcggcgcttcggcatcaaatgggtgatgctgatctcgatgctggcctgggtgctccgcttcggattcttcggcatcggcaatccgggatcgggtgccgttttcctgatcctctcgatgatcgtttatggggtcgcattcgacttcttcaacatttcgggctcgcttttcgtcgaaaaggaaactacccccgacatccgttcctcggcacagggtgtctttatgatcatgaccaacggactcggtgctttcttcggctcctacgcggcaggtgcggtagtcgatgctttcggctggcccgaatcatggtatatctttgcgggttacgcgctggtcgtcgccatcgtcttcgcaatggtcttccgctacaaacacaagcccgaagagatgggggccgtaagccactaacaagcaatccccgtcacaacaaacggccggaaactatcacgttccggccgttttcatttataattcaaagttctcaacgcatcagcaccgagctgtccccgtaactcaaaaaacggaaatcgtgcgtgagggcgtagtcgtaaatccgatgccaatcatctcccacgtaagccgacaccaacaacaacagcgtcgatttgggctggtggaagttcgtgacgatattgcgcacgatccggaaacggtatcccagcggcgtaatcatgatctgcgtggcggccttgagtttctcgatcccctcacgaaccatatagtctgacagtacctgcaatgcttcgcggcccgtaaacgcctcaggcaagtcgtacagctcccactgcccgatcacgcggctcgcatcgggcgcacccgaagtacggatccgccacgccagcgccgtcaaagactccagcgttcggacggaagtggtacctaccgccgtaatattatcccacttctccagcagccgctccacgctgctgcgacggatctcgaaatgttccgtatgcatcggatgcgccgccgcatcgcggtctttcacgggcagaaatgttccggcccccacgtgcagggtcacctcttcgaacgaaaacccctgcgtccgcatccgctcgatcaactccggtgtgaagtgcaggccggccgtcggagcggccacggaaccttcgaatttcgaatagacggtctggtaacgggtattgtcgatctcctgactctcgcggttcaggtaaggcgggatcggaatccggcccagatgttccagcagttgtccgaacgtcagatcagccgtccattcgaagcggacgatctgctcgcggccgccctcgccctcacgccaggccagcatccgttccgcgcgaccttcatattcgaaatcgatcaccagcgggccttctttccattttttgaggttacccacgatgcagctccagcggcacgaacctttcacggcgaacgcccgctcgtaatccgccggatcgtgcggttcgaggcagaatacctcgatccgagcacccgaaggtttgtgcatgataatccgcgcccgaatcaccttggtattgttgaacaccagcagggtcccctcaggcagtatgtcgccgatgtcgcggaagcggcgctccgagatttccccccgttcgtaaacaagcagcttcgatgccgatcgctcctcgagcggatacttggcgatccgctcgtcgggcaggtcgtagtcgaaacggtctatgtcgatatgtctttccattttcagcatatagcgggcacaaaattaataaaaatcccggtctttacggaaaagatacccggtttagaccagcaaataaatttggcgctgcgctcggctttcactatctttatctcacaaaactttgatttagataggaggcgcctcggcaacgctcaaataaatttggcgctgcgctcggctttcactatctttgcatcagatagaaggcggttcggacaagctcgaacgggttcggctcgtcgttcccttttgctatctttacaaaaaatttcgctctgataggctgcgtccggatataagtcggctcgatccggcttcatcgcacgccagcactatctcggcctgtccaatcgctgaaaaccatgaaaaccgattttctggtcatcggatccggcgccgccggactgagtttcgccctcaaagccgcagaacacggccacgttacactggtaacgaaagggaaaatggacgagtgcaacaccaactatgcccagggaggcatctgttcggtgacctatgcgcccgacacgttcgaaaaacatattcacgacaccctggtctgcggtgccggcaaatgcgaccccgcagccgtcgaactggtagttcgccgggccccggagctgatccgcgacctgatcgcctggggcacgaaattcgacaagacacccgacggacgcttcgaactcaaccgcgaaggcggacataccgaacatcgtatcctccaccacgaggacctcacgggcgctgagatcgaacgggccctgataacctcggtacgcaagcaccccaacatcacggttctcgaacaccatttcgccatcgacctgctgacacagcaccacctgggcgaattcgtcacccgccacacgcgcggcctggcctgcttcggagcttacgtgctgaacctggagagcaacgagatcgaaaccgtgctggccaaattcaccgtcgtcgctgcgggcggctgcggcaacgtctattcttcgacgaccaatccgagcgtcgccacaggcgacggcatcgccatgtgccaccgcgccaaggccatcaccgaaaacatggagttcatccaattccaccccacctcgctctaccatccggccgaaaagcccaatttcctcatcacggaggcgatgcggggttacggcgcgatcctgcgtctgcaaaacggcgaagagttcatggacaaataccacccgatgaaatcgctcgcaccgcgcgacgtgacggcccgggccatctataccgaaatgacccgccggggcgaggacttcgtctatctcgacgtgcggcacaaagatccggagcagacgcgccggcatttcccgaacatctatgaaaaatgcctctcgctcggcatcgacatcacccgcgacctgatccccgtcaccccggcggcgcactactgttgcggcggggtgaaagtagacctcaacggcgaaacctcgatccggcggctctatgcgctgggcgaaacctcctgcacgggactgcacggcgccaaccggctggcttcgaactccctgatcgaagcggtcgtctatgccgaccaagccgccaaacacgccgcctcgcagctcgcttcggtcgaaatccaggaaggcattcccgactgggatttcgaaggtacccagcacaccgaagagatgctgatgatcatccagtccaagcgcgagatgcaggccatcatgtccaactacgtcggcatcgtccgctcgaatctctcgctcgaacgcgccctgcgccgcctgtcgatcatctacgaagagaccgaagagctgcacaacaagatcaagcccaaccgcgagctgtgcgaactgcgcaacatgatcgccgtggcctacctggtcatcaaacagggcagcgcattgaaagaatcggtcggctgccactacaactccgactaccccaaaccggacaataaataatccgcaagcaaacctatccacaacctttattaccatctatgaccttacaggaagagatcacccgccggcggacgttcgccgtcatcgcgcacccggacgccggtaaaacgaccctgaccgaaaaactgctgctcttcggcggcgccatccacgtcgcgggagcggtcaaaagcaataaaatcaagaagggagccacctccgacttcatggagatcgaacgtcagcgcggtatttcggtcgctacgtccgtcatgggcttcgaataccagggccgcaagatcaacattctcgataccccgggccacgaagacttcgccgaagatacctaccgcacgctgacggcggtggactccgtaatcatcgtcatcgacggcgccaagggcgtcgagtcccagacccgcaagctgatggacgtctgccgcatgcggcagaccccggtgatcgtcttcgtcaacaagctcgaccgcccctgcaaggatcccttcgacctgctggacgaaatcgagaaggaactccgcatccgggtacgtcccctctcattcccgatttcgagcggcgacaccttcaagggcgtttacaacatctacgagaagaacctcacgctctttacgagcgacgaacggcaaacggccgacgcctcgaccgtagagatcaacgacctcgcatcgcctgaactggacgaatacatcaccgaacgctacgccaaccaactgcgcgaagacaccgaactggtcgagggcgtgtacgacgctttcgaccgcgaggcttacctgcgggccgaactggccccggtcttcttcggttcggcggtcaataatttcggcgtgaaggagctcttggagtgtttcatccgcatcgccccctcgccgcgccccgcaccgaccgaaacccggatcgtagagcctgccgaggcgaaaatgacaggcttcgtcttcaagatccacgccaacatggacccgaatcaccgggaccgcatcgccttcctgaagatctgctccggcacgttcgaacgcaacaagaactacctgcacgtgcgcagcggcaaacagatgaaattctcctcgcccacagctttcatggccgagaaaaagtcgatcatcgacttcgcctacccgggcgacatcgtcggcctgcacgacacgggcaacttcaagatcggcgacaccttcaccgaaggcgaaaagctcaaattcacaggcattccctccttcgcacccgaacagttccgttatatcgagaatgccgatccgctgaaattcaagcaactggccaaaggcatcgatcagctcatggacgaaggcgtggcgcagctcttcacctcgtcgctcaacggccgcaagatcatcggcacggtaggcgccctgcaattcgaagtgatcgaataccgcctggcgcacgaatacaacgccgcctgccgctgggagccgatctccatctacaaagcctgctggatcgagagcgacaacgccgagcagctggccgacttcaaacggcgcaaacatacgaacatggccgtcgacaagcacggccgcgatgtatttctggccgacaccagctatgccctggccctggcacaggaaaacttcaaggacatcaggttttacttcacctcggagttctgatcccgccagcgatctaaaatataaacgccccgtgctaccattgcacgggtggttttattcataaaaaagctctgccctgaccgtatctacggcatacggataattgaatccggatattccgattcgtcgatggaaccgaaatatctgcatttcatgatcagaacgatacctcgtaatcgtattcctttccggagaaaacagataaagattatgaaaaacgtaattgctataataaaaaacgcttggggtgacagtccgccaccgaaagtcaaaaccggctttattctcaatatcattggattgacagcttttttatgcttatccggcgcaacagcccatgcacaatcggacaaacagattatcaacatggataacccggactatcacatcgatgtggaacgtttttgctctccatttattgatttcgataatcccgaagagtacaatagcaaagaagtaaactatcgctatgtgaaatacacacaaaacatgaacgtttctttttctgagagatatccgattttaatacattatataagtatggacagtctcgttaccaagaaagcaactttttgtgataccggcttcgggaaactgaatttgataaccaatgcacaaggcaaattaatatcgatgaactgcgaaacgaagatggacaaaacaggcttcaaggaactggtaaaggctgtcagacagaaatatggcaaacctgccctgaagaaagcagaaacaggtaaagacgaacttaaaaagattctgataaactcgatggtatcaaagggcaaaaacatacccgtgtatctttggaagcaggatgacgaatatatcggactgttcatggaaagcgaggatgtcgtaaatttcttccgggcaaaaaaagaatttgaagatttactcatcaaagtaaatggtccttacattgaggcaacaatagagttgcaaaaatggaagaagaaaatattcaagagataagaaacaggctataataagctacttttaaatcacatgaaaataaaaaaatatttaacataaaaatacatgcaacgctataaaccgatgactttcctcccaacacaggataagaaggggagagggaaaaagcctgtcgccactccgaaagcggccctccactgttgctgcacaaggtcagaaggacagctgcggcaaaagcagaatcaaacctcgtagcccacacgcccccaactgcattcgatattcacaaggaaagggaaccttttttcccgcaatcttttatatccggagtgaaagatcagaaacggattccggcgaaatccgtctttcaacggatcgtcgatacggcatcgaactcttcgggagcgtaagtccgcaaggcgagttttttaacccaaacgacgaagatccccgtgagtaccaagttcagcacgagggtcagcaccgaaataaccagtgccggaccgcccaagctatatcccagcgcaatgaagataacgcccgcccctacctcgccgcgggtaaacataccgatcgaaagggccagacgttcgctcaacttccgatcacgataaaaaaacatcgggaaaagtttgcccaggttggacagcaacgagacgatcaccacatggaatgcgatcacgccccacgacatcatgggctgcgaaccggtcacggaagaagcagcttccccagtcgcagcagtcataccgataaacaacggcatgctcaatccaaccaaaaacatgaacaagaacgaaatgccggaagcggccatccgctccccgcgagattcgacatgcctggttttcatcaccatacccaatacgaaagcgggaagcagcacctcgatatgaatactgccctcctcgccgaaataatatttggaaagcaggtaaaccagttgggtaacaccgaaaaccacgaccgaataggtcagaatcgcccaccaatcctgcctcaactcatacgtactgagtttcttccaccccagccacaacagcagaaagacgatcaccacgacgacgaaaagctgccagcgcagaccgatcatcaggatttgcagaggtatcatcagcaggatggtatccagatcgtcgaaaatcgccagcacctgaattttccgatacatccagcttcgcttgagccgcagggccgcgagcatcgtgaacaggatgccggccgaagtcggagcggcaaaacggctcaacaacagattctctttccaggcgtcgccattgccccaaaactcgggcggcaacaacacgaaaacatagtacagagcgatgagcagccaaggtacggctgccgtagccatagcgatgaaatagtcctcggcataggagcgccaacgttttttatcgatctcgaattcccggccgacattgatcatgatgaacgacagacagacataaagaaaggtcgtcgccccggcccgaaatgcaggatagctctctccgagcatccccggaagaatctgggaagccacgaggccaaggatgagaagcagggaaaatgagaaaatctttttcatcggaggttttcaatagaatgttcgcgcagtcggcacaaggatttatgtcggctaaatcgcgggtaccgcccggaattttggtacaaagaaaatcaaaatcccggaatttccccgcatcgtccgccaaaaaagcaccgactgcgcacctcaacgccactttttcgtgcggaagaacaaataggtcacgaatccgatgacgatcatcacgccccaggccaggatataaccgtgctcccactccagttcgggcatgttacggaaattcatcccccatactccgaccagaaaagtcagcggaatgaagatggtcgatacgacagtcagccgtttcataatatcgttcatccgcaaatcgttgttcgagatatacaaatccatcagcgacgaaagggtttcacggcagatgtcgatattttgcgccacgttgagcaggtgatcgttcacatcgttgaagaagggccgattgacccggtgcaacaaactcgaatcggaacgaaatagccgcgaatattgttccttgagcggcagaaccgtccgcttgagctgcatgtaatcccgccggagctcctgcatctgtactccgatgtcccggtctccggtatcggccagcaatgcagattccagctcctccaacccgtcgctgatcgccgctgcaaccgacatataaccggttatcaagccattgagcaacaccgaaaacaggtagtccgactgtcgggtacggattttcagtacattgttacggatggcacgcatcacatcgtcgaaaaaatcgttgtcccgctcctgaaacgtcagcacgaaatcagcgccctgcaccagactgacctgcatcgcttcgccacccataatctgcttggcaataatcacattgtactgatcgtgctcctcgaccttgctggcatggtcggtattgagaatgtcctgcatgaccagaaaatcgatcccgaaatgcgtacaaaccgtctgcacggcatccgtatcttccagtccgtgaatctgcagccaagtgatgccatcgggctgaaagcgggatttcatctcctcgaaatcatctcccgcagcctcttcgacccgatccacagtataactgcacagatgcagatgagtccgtgttttcgtatccccgttgtaggcgagcttgtcgctgagcaggttatttttcatggctgtacgattaaaattcgaccgtgacgcccaacgtcggcaccaacgtaccgctcgcctggcggatatacttcatcttataacgctgctccgaaggcggagccgaaggattctcgatcacgccggtactcatcagcacgtcgggctgacggagcttgctgaaggtcacgttctgcaaatcgacatagatacccagcatgcatttacggaaataaaacaccttatcgacgcgcacgtccaactgggcgaaagcgtcgagcctgccggtattatacttcgaatagtcgtaataggggcgccccgaagcgttccacgcctcgacgagcgacgatttctcgacgtcgtacggcgtataaggcgttccgccgatagcgctcagcttcgcaccgacgctccacccgcgagagaaatcatacgtaccgctgatattcgccacgaaacgattgtcccaggcagaaggaatatatttcgcatcgtgccggctgcggtattcgctgctgaaaacggtcagggcgccgaccagattgaaacgatcgggaagctgccaacgcaccatcagctccagaccgtaggcacgtccctgggccgaagaaacgagcaattcgtcgcccgaggtgccgtagtcgttgcctttgcaggtcagcggcacgtcgtccgccaccgaaagcgggatatccgtataatatttgtagaaaccttcgagcgaaaccaccaaccggtcacgcagacgccaattgacgccgacggcgctttgcaggacccgcatatactccaagccccgattgaccaactcgcccgtattgtccttatagccgagtgccgtatagggcggcaactggtagaaaagccctgcgctaccgctcaccgaccaactgtcgctcaaggcataggaagccgacacacggggcgaaagctgcttccagaaacgctccatctccgtcgaatagtcgcatccgtcggcccgcacgcccatcgaaaccgtcagccgcttgtctgcggaggcatagtcggcccccacgaaaaagccccagccgacaatccccaaataagtgcgatagtcgagcagctcggcttcctgctgataagtccgctgcaaagtcttgttatgataggtagaatagttcaattcagcaccttcgcgcagcgtccaccggcccaggtaggagcgattttcgaaccgcagggtcgtcttctgctccacgccccgcaaacgcagggtcagattatccggagtcgattcgtcgttgttgcggtatttggtattgcggttattcaggtagttgtgactcaacgccaccgactgcacgtgccggccggcgaaatggcggtacacggcacccacagtaaaggtttcctgttggatacgaggcaggtaactgagcagatattcgttctcctcgcccttctcgtcgagattgagcttcatgttgtcgatgcccaccagtccgaggaaagtcagctcgtcccgctccgagaaacgggtcttgaccttcagttgcccgtcgatgtaattgggcaggaaaggaagccccagcaatttgaagaggaactggagataggattgccgcacggaaaagaggtaagtcgtctttttgcccacgtgtccgctgccgctgagcgacacttcggaggcaccgagcgtcgccttgaaggtctgccgttcgagatcgccgtcccgcagccggaaatccagcaccgaactgagcgccccggcacggtcggcgggaaacgaacccgtatagaaattgatctcgcgcaccagatcggaattcacgatgcttacgggaccgcccgtggcaccctgcgtggcgaaatggttgatgttgggaatttcgatcccgtccatgaagaagcggttttcagaaggtccgccgccccgcacgatcaggtcgttgcgataaccgatgggcgaaaacgacacgcctggataggaacgaacgatacgcgacacgtcacgattggagccgggactcttctcgatctcccgcatcccgatcacctgcatactgaccgggctctcgatcgtacggcggaaaggcgagggacgaacgacgacttcattcagatgctccggctcctcctccatctcgatttcgatgaaaggcgtccgggccgacacctggtattcgggggtcacgaccgttctgtaaccgatgaacgacgccgtcaggctataaatgccgggcttcacctgcaggatctcgaaacgtccgagcgaatcggtcatggcgcccttaccgggctggccggtgatcgtaacggcagcataggcgaccggttcccgggaaagacggtcgataaccctgccccgcacaggataccccgctgcggcccaaacagaaggaatgtacaatgccagcaaaacgattgctgccagtaagttctttctcataattcacaaaatcaaccgtccgcaaatctaataaatttaccggcgtttcgatcttccggccgtaaagaatcgaccgaggcggaccgattcgaggcgaatcggacgatttacggcatcgacacgataccccgaatcgcccgccggcataccgtaataatcgaaagagatgcaaaaatcatgaaatccgccccggaaggaatcgaaatttatcctatttttgtttccgatcaatctcgacaatatatgcgtacactgatctcgattctctggatttcgttctttccgcttgccgcagcagcgcaggacgacgatctgtcgtatcggctgaaaaaggtgataaaggataaaaaagccgaaatcggtattgcggtcatcctcgacgcacaagatacggtaacggtcaataacgacgaccgctaccccctgatgagcgtattcaaattccaccaggccctcgccgtcgcagattacctggaccgaaacggactgacgcccgacacggaaatattcattccggaagaagagctcgtccccgacacgtacagtccccttcgggaggaatttcccgaaggcgaaatctcgctttcagtcagccgtctgttggagtacagcctgcagttgagcgacaacaacgcctgcgacatcctcttcgagcacacgggcggtccggcagcgacagaccgctacgtccggtcgctcggactgcacgatttcgcgatcgcagcaacggagcagcagatgcacgacgatccgcaaacgtgctacgaaaactggagtacgccgctcgaagccgccgccctgctggaactgctcgtaacggaacagattctcactcctacactgcgggaaatgatccggcaaaacctgataagctgtaaaacaggtgccgaccgtcttccgaaaccactgtcgggaaccggcgccgtcatcggacacaaaaccggcacgagcgaccgcgacgaacgaggcatcttcgccgggaccaacgacctgggattcgtcatcctgccggacggcacccgctataccatcgccgtcttcatcaaagattcggcggaaaacccggaaacaaatgcccgaatcatagcggatatctccgaaactgtttatcgatacgttcacgacgaataccgggaaaacgacatccgccccggcaaaaaacacgtcgataaaggagccggaattggattcgaatccaattatttttattaaatttggaaagaaaacagcgtaatttgcactgttcttgcacggaatcagaaaaacttcaataccccaagcatgaaaaaaatagcggcctatctcattcctgttctcgcctgtttcgcagtaggtatctcggcaagttttttccaggcttcgtccatcgccgaatggtacccgacgctgaccaagccggcactcacgccgcccaacatcgtattcccgatcgcctggagcgtcctgtacctttgcatgggactttcgctcgggcgcctcatcgtgcgtcggcagcacaaaggaatcatccgtctgtggattttgcagctcatcgccaacttcctgtggagtatcctgttcttcacgctgcgcaatccgctggccggattcatcgacatcgtactgctgaatatcctcgtgggactctacatcttcgctgcgagccgcagggaccgcgctgccgcctggctcttcgtaccttacctgctctggacgctcttcgccgcctacctcaacggatatatcctgctgcacggcaccccggcggcggctccgacgacaattcaaaccgaatctttaacaatatcaaaacctaaaacagaaagaattatggttcacaaaatgcccgaacttccgtattcgacggaagcgctcgctccgaaaatgagcaaagaaacttttgaataccactacggcaaacacctccagacctacgtggacaatctcaaccgcctgattcccggcacgccttacgagtcgatgtccctgcaggaaatcgtcaagaaagccgacggtccgattttcaacaatgcggcccaggcctggaaccacacgttcttcttcctgatgctgacccccgatcagaagccgatgcccaaaaaactggcggatcgcatcgcccgcgacttcggatcggtcgaagccttcaaggaagagttctccaaagccgctaccggacttttcggatcgggttggacgtggctcgcagccgacaaggacggcaaattgcagatcatctcggaatccaacgccggcaacccgatgaccaaaggcctcaagcccatcatgacgatcgacgtatgggagcacgcctactatatcgactaccgcaaccgtcgcgcggatttcatcaaatcgtactgggagttgatcgactgggacaaggtggccgaccgcatattcccccgcaaataccactgcaccgcctgcgactacgtatatgatccggccaagggcgatcccgaaagcggcatcgcacccggcacggcattcgaagacatcccggacgactgggtatgccccgtttgcggactctacaaagattccttcaagatcgtggaagagaaataggcgatcaggaaatttgaaaaaagcagcgcataaagcgctgcttttttgtgtcgggagagtccgtcgcagacaccggacagccgtttcgccgcacccaggaaaaaccgaatagtccatttcgtccgacacgagaaaataaagagatcgacccggcaacagatcgacctctttgtttcagtccatactaatctctactttattacgactgaaacctttatcggcaagacactcttcttctgcacaaactccgcactacggtttcgaaaaatatttcatccgggaaacagagagccgcctcgcttcaggttatcaatccaccgaaaagatgcctcgcaggtcttttccgaaagctccgttctccgcagacgcatatcatccgaactgtccgttcatcgggcaggcaaaggctggtcttctgactcgtccccgccgcaacgccttcccgaccccgcaggaccagtggcaaaagagtgtcgcggcaatacacccggcatccgaaacgccgcccgcaagcgggccgatcacctcggatcgtcgggcaggactcacagcagcgggaactgtcgcagactttcactgcgttcccatttaatctgacggggcgtaacccctcgtgaaccgttgcagtgcaaatgtaagaaaatatttgctatctttgcccggtaaccaaaaaatattttgacagaaactatgaaacacgcatacgtatttccgggtcagggcgctcaagccgtcggcatgggcaaagacctctacgacaatgtccccgaagccaaggctctcttcgagcaggccaacgaaatcctcggtttccgcatcaccgacatcatgttcgccggtacggacgaagagctcaaacagaccaaagtcacccagccggccgtattcctccactcggtcatcatggccaaggcgctgggcgtgaagcccgacgcggtagccggacactcgctcggagaattttcagccctggtggtggccggtgctctttcgttcgaagacggtctgcggctcgtttccaaacgtgcgatggccatgcagaaagcctgcgaagccgtacccggtacgatggcggcaatcctgggactcgacgacgccaaagtggaggaagcctgcgcctcgatcgacggcgtggtcgtggcggccaactacaactgccccggccaactggtcatctcgggcagcgtcgaagcggtcgatgccgcctgtgccaaactcaaggaagcgggcgccaaacgcgcactgcgcctgcccgtaggcggtgcattccactcgcccctgatggagccggccaaggtcgaactcgaaaaagcgatcaacgaagcacccttccaggctcccgtctgccccatctaccagaacgtcgatgccaaaccccaaaccgatccggcgacgatcaaggccaacctgatcgcacagctcaccgcaccggtacgctggacctacatcgtcaagaacatgcttgcggacggcgtgaccgaatttacggaactcggtcccggcaatgtcctgcagggtcttatcaaaaaagtgaatcccgaagcggtcgtagagtcgaaatcgacgttgtaacccgcctccgaaaacaaaatagaatcgattgacaagcaatcgattctattttgtttataattttttttcatatcacaagatcaaatacgccaaattcgattgaattctttctatatttgcacaaaaattacagaagatatcaaacgacatcaataactatgacatcgttaaccgaatttttcagccgacaggaggatgacaatctgaaaggtatttcgcacaagaacaacctcttcaagcgaaatatcatcgcacatatggcggtgaacggggagtgtacgctctcggagcttaccaaagagttgcacatcagcgtaccgaccatcaccaagctcgttcaggaactcgttcaggagaacatcgtcaccgatctgggcaaggtcgaaactccgggcggacgacgtcccaacgtcttcggactggccagctcggccatctatttcgcaggcgtcaatatcggccgggacaacatgtcgttcctcatcacggacctgcacaacaatatcgtcaaagaggaactcctgaccgacttcgaactgcaggatcgccctcaatgcctcgaaaaaatctgctcgaatatcgcacatttcatcgatacgtgcggtgtggaacgcgcgaaaatcctcggagtgggtgtcagcgtcagcgggcgcgtcaatcccacgacgggacgcagctaccgctatttcacttcgagcgaacagtccctgcgcgatatgatcgaacaacgcatcggcatccgcgtactgctcgaaaacgacacccgggcccgatgctatgccgaatacaccaacagcaaatccaaagacgagatggacgtactctacctccacctcggacgcggcctggccatcggtatcgtcatgaacggcaaactctactacggcaagagcggctttgccggagagttcggacacattcctttcttcgacaacgaaatcatctgctcctgcggtaagaaaggttgcctcgaaaccgaagtttcgggaatcgctatcgaacagaagttcggtcggcttatcagccagggtgtcaatacgatcctgcgcgagaaatacaacaagcacgaagccatccacgtcgatgagatcatcgacgcagccaagcacgacgacaatctctcgatcgaactgatcgaggaggtcggagaaaaggcgggcaaggccgtcgccttcctgatcaacaccttcaatccggaaacggtcatcgtaggcggcgagctggccgaagcgggcgactacctgatgctgcccctcaagtcggcgaccaacaaatactcgctcaatctggtctataaggacaccaaattccgcctgtcgaaaatgggcaagacggccagcgcctggggtgctgccatgttgattcgcaatcaggtgctcggactttgctaatgatgctccgaggccatatttgcagcctgcgggccgtcgaacctcaagacctcgaactgctctgccgatgggaaaacgatccttcgttgtggacagtcagcggtacgatcgaaccgttctcgcgctattcgatcgaacaattcatccaggagcagcaggctggtatttaccggtgcggacaactgcggttgatgatcgacgacacagcgggggaaacgatcggagccatcgacttgttcgatttcgaaccgcagcacgaacgggcaggcgtcggcattctggtttacgatccggcacagcgcgggaaaggatacggggcagaggcattggctttgctcgaagagtatgcccgcacggtactccggctgcggcaactgtggtgcaacgtactcgcggacaacgtccccagtctgactctcttcgaaagagccggattccgccgggtcggggttaaaaaggagtggatccgcacccccgaagggtacaaggacgaagtattgctccaaaagctgctttagacaatttgaaatacaaatctgccggaatttttctgcccgataagtgatcggcgacggagcatcccggtagattttttttatcgtatctcgggaggaaactcgcatctccacctcccaacatccggctttttcaagcacccctcgcaccgctgtcgtgccggagcaatccccgaccctgccgaagctactcttcgtccggtaaatcggccgcctgcaaagtcctggcagactgttgtttcttggtcggaattcccagtttgcgaagccgctccccgcagcggacaatgttgtcgttaccggtgcaaagccgcttgtaggcatcgttgtacttgtcccgggcggcgtcgagcgactgtcccaccccttcgagcgaagcggtgaaagccaccaactgctcgtagagtttcgtaccgtaagtaacgatgtcggccgtattcttgttctgtgcgttccgcttccaaagatcgtccaccaacttcagtaaggcgaaaagattggtcggcgaagagatgatgactttcttgtcgtaggcatcggcccagatggagctgtcgttttgcagcgccgccagaaacgccggttcgttgggaatgaacataatgacgaaatcgggcgaatcgagcaatcgctggtactccttgcgacccagttcgacgacgtgctgccgcaccgacgcgacgtgcgacgcaagatactggcgccgggtcgcctcgtcctcggccccgacgtatccgacgaatgccgtgagcgacaccttcgagtcgatgacgatccgtttgccttcgggcagataaagcaccacgtcgggccgcaggttgtttcccgcctcgtccttgatattgagctgcgtatcgtaatgtacgccccggatcagattcgaattgtcgaggatcgtttcgaggatcatctcgccccagtcgccctgcactttggagttgcccttgagcgcgttggtcaggttggtcgtttcggtggtgatgcggcgattgagttccatcaggcgttcaagctcgttgcgcaacgccccccgctgttcgttctcggaggagtagatcttctcgacccgctcgcggaactccacgatgttatcccggaaaggtttcaacaacacgtcgagcgcttcgcggttggtctccttgaaagtgcgcgactgttcgcccagaatgtcattggcgaggttcttgaactgggtccggaaagtttcctccatcttttcgcgttcggcacgtgcctcggccattcgctgttcggccgcctccagacgggcctgcgccagcgtactccgctcgaccagggtacggatttcgatttcggcggcagcggctttctcttcggacacccggcgcgactcctcggccaggcggcgagcttcatccgcagcggcccgttcgtccgacaaacgggcgttatcccgacgcagggagagcaaaagcaaacccagcacgacgcaaacgacgccgagcgacaataaaacgacaacgattccggtattcatgacagacggtgaaaaagaaaaatgaacgagcttatacggatctgcaaggaaatacggcaatacaatctcccgaccgccgaaagccgaaacaggagtgtctcccccacgaccgccgaacgtattccatcgtgctacaaaaataggaaaataatccctatgaacggcgtccggcgaaattaaattttcaaaaggaaactacgaccggccaaaagataccgcccggaatccgacgcattcggtccctgttgaaaataaaagccaaattattgccattaactcccggatttcgtacttttaagacacaaaagtgcgaatctagtatatagatctgataatcagaactgaataatatcaaaggtaatgatttagagacagaaccttctctgtgcttacatcgatattctcttatcaaacaattcttgttgcaaagataataataatctataactaaggcaaatatacttttctccgatatttgttgtatcggcatacccaacgatactaccgttcggaagtgatcatacccagtacatcgttgggcaacaagattctattcaaaaagtcagacatcgcgcgtattctacaaaacaattttaccggtccttgcaaatgatgaatgacctgcttttatgaatctttccggaatacaatgagttccggcaggaaatgtttcgcgcgattcacttgccggatacatcgatcgcggttccttgtccggcgatcgtcacagaaaacatggtagtagcggtagcgtgtagagcgcacgagtgatgcgatttgtcatttgaagtcgcttttcgtatagtcgagtttcgacagcgtgtcgtacgtctgcttcgcgtcgccctcggcagcagggcgcaggccgtagtgtcgttccagtgcatcgaggatctcccgcgaccgtcgagcctcgaagtcgtgcgccagcttgcggccgtcgagccccacgcgcagcgacacgatatggatatgccggcgttcgatgtcctcgtgcagaaagacgaaacagggctgtgcgccgtaacccatacgctccatatactcgcgtgcgatctgccgcagctcgtcgttcgtgagacggtcttcgggagcgggattcagggaggcgtgaaacacgggattcttcgtgcggcggttggcttcgaggtacgggtcgaaacaacgcagcgcctcgcggatatcgaaatatcgctcgtccgtgacctgcatcggggtattgaacgccgccagaaaacggccctcgccccggtcaatcttatccttgttgtaataaagagctcccgccggtgtagccccggaggttatccgcgcgaccatagctcgtaaagttcgcggctgagcgcgatgacctgctcggaaagggctttcagctcgcgcgtgcggcgctccagaaggagcacttgtcgcggaatagccgtgtgcgaaaagtgcgtgttgacggcccgcacgatctggttgtagttgttgcccacgcgctgtatctgctcgtaaaactggttcagacgggtcacatatcggcccaaggtcgggtcgatacgcaccacgcgaaactcttcggcgaagattcttttgacgataaaccggctgcggttgtgttccagtccgacctccgcaagcatccggcagaagcggatattctcttcatcgttgagcttgaaattgtaacgatgggtcctcggatcggcaaggcgcggcctgccgggtttgctttttccattcatagcttcgggattaaaaaggtgtccgactcgggaggacaccgcagcctcgcagagcgaggacctttcgtatgccgaaaacattttcggcatacaaaggtacacctcgctaccgtccggcgacggtaaatgcgtcgagacgacgcagggtacgaccgacggtgcttcccgggctgcaatattacaacgcttttcgcctgataacaagtcgtttgatcggcctggaacggcctccatgcgacatacgtcgaaagcctccgaagggatactatcttcgctccgcgagatgaatgacagcacctcctgctatcatgcgatgacagctgtctgtcacggatgtactgctatcgatgaaatattgcaatcatggatatacatccatcatagacgtactgctatcgatgaagtactgctatcatagacgtacatccgtcatagatgtactgcaatcatggatataccggaaacaaatgttcaaaccctgttttgcctatggataaacaacccgtattcttctgcgtctgctcacaaaagggcggtgtgggaaaatcgaccttcacgattctgctcgcaaactggttgcattacgctctggggcgcgatgtgctggtcgtggactgcgacgctccacaatggagcatcgtcgcgcagcgcgagcgtgaactcgatgtactcgaacgcaacgaccgctacaagctcatgatggtgcgactgttcaaacgtacgggccgcaagatctggcctgtggtgcgctccacaccctacgaggggctgcaagccgcccgtgcgtactttgccgccggcgaccgcgaagccgacttcgtgcggctcgatctgccgggcacggtcgccgcacccggtatcttccgcctgctcgcccagctggatcatctgttcattcccttgaaagccgacaagctggtcttggagagcgctctttcctttgcgcgggccgtcgatgagcggctcgtacataacgacgcacaccggctgacagggctgcacctgttctggacgatggtggactggagggaacatagattgtgtgagggtaataattttcgtttctttattttgtacttcccagctacctaacaagcaacaaaccgaaccttcattttcagtaaattgtgattttagttatagccattagattaaattaataaatattatggcaacagtaaaaataaaattacgcccgtcatcagtcgagggtaaggcaggtgttatcttctatcaaatcacccacaatcgtaaaacgcaacacataacaacccgccttcgtgtccaaccatttgattggaatgctgataaggaaaagttggagccgtccgcacccaatcgctcaatgattcagaattgtatagactgcgatgtagcattgttacggagtttgatttccaaccttgacacttgcagaatgaattactcggtcaatgatattataagtcgttacaaatcgcctcaaaatcatattctagtgctggattatatgcgcatgcagattgagcaacttcgcacggccaatcgtctcgggacggccaagaattacgaaaagacgatgtgtagcttcggagagtttttaggcgatataaaactaccacttcctgccatgaccgagcaggtgattgcagcctataacgtcttcctaattcggcgaggtctggtgcgtaattctgtatcattttatatgcgtgtgttgcgagcagtttacaacaaagccgtacgtcagaaacttatcgaacaaacccatccattcacagaagtttacactggtatcgaccgcactcgaaaacgtgccgtagcagagtcggttatgacatctttataccgcctcgaactacccgaaggctcgccacttgcactaactcgagacctattcattttcagttactgcacacgaggaatggcattcgtggatattgccttcctacgaaagtcaaacttaaaaaacggagtaatttgctatgcccgccgcaaaacgggacaactcttatccgtgaaaattgaaccgagcatacagcaaataatcaatcggcacaatgtttcggattcaccgtatgtattcccaatcctaacctcgaccgatgccatagaagcctacgagcaataccgaatcgcattgaatacccacaaccgcttactcggcaaattatcagagatgctggactgcaaatgcaagctcacctcgtacacttcgcggcatagttgggctactgccgcgagaaaccacaatgtccccatctcggtgatcagtcaaggtatgggacatacctcggaacagactacgcagatctatctaaccacattagaaaattcggtaatagacaatgcgaataagggaataattatgtctttactggagtagttccgtaaaagaacccgcacattgataccaatattttgatttacaatgatataataggtattattggaagattaatttataactatgcagccatcaatcgggtggttatgccacgctctaaagaatgtgcgtgtgcgttttataatatataaatggtggtaatagaatatttagatttgtaattctctaatattcagcaaattcctggggggggatttttctctttttaccagtgaaaataatcccctgaaatgggcttctaattataaataatttactacctttacatccgatttcttacgggttcttttacggaacccgtaagatacagatgggaataagagcagacaagcctattatttctcataaaggtaacaccgagatcacatggtgccaaacattgtggagcggcaatataatttgttgcaaacttttgatattccattttataacttcgtgataatgcacaaaatacagaatcatgtaggaatagagggtatacaggtaaccgagtcatagagcgaatgagcgagaattcgattgacatagaaaagcattggtatgcgatgcgcgatttgaaaaggagtaacgcccttctacctgcctataaacagttatcgcaggccggcatggaagtatttacgcccatggtttctcgggtcttttccagaaatggtaaacgaatcagaaaagaggttcccttcatgcaggatttgctttttgtaaacgatgttcgccaaaatctcgacctcatcgttgccaaaactcctacacttcaatatagattcaagaagggcggaaaatactgcgaaccgattgtgatcccccaagatgccatgacgcgatttatcggtgcgacacaggcatcggccaatccaaaataatccctatgtttacaatcagggtaagccgcgatgatagcggataaatgaaaaagctatcgagattttggttagattaaagctgcaaaacctttactaactaaaacgacgatagccatgagagagcaaagaaacaaaattagtttcagaggacaaaagatttatgtaggaatcgacgtccatttgaagagttggtcggttacggtcttgtccgaaacctccgtattgaagaagtttagccagcatccgagcccagaagcgttgtacggatttttaactcggagttatccgggcgccgagtatcactcggtgtacgaagcgggcttctgcggattttggatacacgagcgtctgacggccttagggatcgacaacatcgtggtcaatccggccgacgtgccgaccaagagcagcgaaaagctgcgtaagaccgacaccgtggacagcggtaagctggcgcggagtttaagagccaacgagctgaaaggcatttatacgccggacagcgtatcgttggagatgcgttccttgataagattgaagaactcgataaccaaagacacgacccgtcagaagaatcggctcaagtctcaacttcggtatttaggcatcgagattccgcaggagtttctcactccgttttccaactggtcgaagcgctttttcgcctggttgaaggagatagagacgctcaccccgagcggccgtcaggccctcgacattcatatccggcatctggaagagttacgccgtcagaaactggagatgacacgggctttacggacattggccaagacggatcgattccgcgaaccgctgcggttgattatgagcgttccggggttcgggcaggctacgggaatggcgttcctctccgagatatgcgacataacccgcttccgcaatgccgaacaactggctgcctatatcggaatgatcccgatgtgccactccagcggagagaaagatgggacgggggatattaccatacgaaaacacgccgttatgcgctgtaacctgatagaagcggcatgggtggcggtacgtcaagaccctgcgatgaacctgttctatacggaacaatgcaaacggatgcccaagagcaaagctatcgtaaaggtcgcccgcaaactggtaaaccgtctattctttgtgctgaaacatcagaccgaatatgtcaatagtatcgtgtcatagagaaacccttccggtaaacggattttcccagagagaatactacatagttgttgcggcgttaacgtccgcttaaaataatctgctcctctggcctttgtaaactaataagggatatgcggcagagagctgaccgctaaggaaaatctgtttatcgaaggattttttcgggttctgaaatctcggctttcgagagagccaaaggtgttaagcacgatgtgcctccgcaccggctcgatcaaaggccggcggaggctctcgtgccttgacctttggccgagaagttcaccaagaaatgcaatacgctgtaaataagataaaaacaaatttaaccgaaaactttgatccaattttatttggattgtaacaggaaattacgctatggacgaaatttccgacctgatgtgcggccgcaacatccgcatgatcggtggggtattagacgggtacgagggcaaactgcaaaccataagaggttctaaaacgaaacatctgattatcattctgccatcccttctggcggtcagcgtagagataaacgacgagtatatcgagttgttgtaaaccgtcctacttactcattgttcgttttagtcctatttctaaaattactttcatgagccagacttcccagactttgaacaccttgaatcatgtgcaggcattactcgccaaggactccaaaaccattatgaagcgagaaaacatcaatggaaacagagttcatttatacgatgtcggtcaatactgggcagcattcgataagtctgcatttctgctcgggaaaatgacaaacgaagattgtgacattgtcatacttcacctgaaaggccatccctttcctatcctgatgtattgtgtacattatgagaaagtgaaagatctatgtcgcaagcatataatggctaaaaagggcgtagaatacctccagttcatcactcatcccgctgacgagaaatcataccatgagtggtatcgcagacacgtaattgacgaagattgaatccggcatctgacaaaatataaaaaattcattgagttatgaataaggatttgataaccctgaatgaagtgctcaacagcggaagtagcatcgacctctatcaggaagagaacaccggtctatgggcgacgtacggttattcggcttacctcttattccatcagaacgggattcagtgtctggcgaatttttcaatacatatgcagatgccttgtgtatgtataaccgaagccgacctcaaaaggttggtcgccgaaaatccgcagactatcgaagccaacgacgggtattaccacctatccaccgagtccaggatcgatgccgactcctatcgaatttgggtgaacagcctgaaataaaaagtaccggcaatgaacgaactattgcaaatctttatgcccgctctgatcgccttgttctgtacttgctggatatatccctatatcctgaaagtagccaaaataaagaatatcgtcgataatcccgacgcacgcaagctccaacgcattcccatacccgttctgggtggtttcacggtggtgttcggtatcctgacgggaatcatgagtgcgaatctattcggcaatttcaacggcatattccccatattctcggcaatcatcttcattctgatcgttgggcttatagacgacataatatcattatctccaaaagtaaggtttgtcatcgaaatcatactggtcctgtatctgatatacaccacgaaatgtcaattaaacgactttctcggattatgggggctggatacgattcccaactacatttccattcccctgaccaccttcgcctgcgtgggtattatcaacgccatcaatctcatcgatggtgtcgatgggtattcttcgggatacagcatcgtcagttgtatcctgttcggtgcaatgttctatacgctgggcaatatcagaatggcgacactggccgcaattgtaggtttttcgctctttccattcttcctgcataacgtattcggcaaacactcgaaaatgttcatcggggatgccggaacattgtcgttaggtattatcttctctgcattcgtaaccaatatgttgtcgtcgaacaacgagattgcggtcggtgaaaacctcggtctgattccctttacggtagctacactgtgcatcccggtattcgatactttgagggtgatgagtacgagaatcatccaagggaactcgcccttcaaaccggataaaactcacctgcatcatctgttcatcaaactaggctattcccatatcggcactacgctgtcgatcatcttcatgaatctgttggtcgtactatgctggtactgtgcctacaaattcggactgtccatcaatatgcagttgtacatcgtcatcgcattgggagtgctcttcacctttattttgtacccgatcgtcgatagtcaaacaggaaaaaatacggcgatatcacgctttttacgacgcatcggctctcttagccataagagccgcagtaaattctggatttcgatgcagaaaatcgtggatatatctgtcgtaaaacaaattcaagagccgcaagattaaacacaataacagtccatacaatacgaaatctatgaagggaattgtcctcgccggtggaagcggtacgcgcttgtaccccatcacaaaaggcatctcgaaacagctaatgccgatttacgacaaaccgatggtctattaccccatctcggctttgatgttggccggcatccgggatattctgattatctcgacgccttatgatttacccggattccaacgacttctcggagatggttctgattatggcgttcgcttcgagtatgccgagcagccgagtcccgacggcctggcacaggcatttacgatcggtgcagactttatcggcgacgacagcgcttgtctggtgttaggcgacaatatcttccacggcgctggtttcacggacatgctcaaggaggctgttcgcactgcggagcaggaacggaaggcgacggtattcggctattgggtaaacgatccagaacgctacggggtggccgaattcgaccgggagggcaattgcctctcgatcgaagaaaaacccgcccggccgaagtccaactatgctgttgtcggtttgtatttctatcctaataaggtagtggatattgcaaaaaacataaaaccgtcggcccgtggcgaatatgagattactacggtcaaccaacgatttttggccgatggcgaactgaaggttcagaccttgggtcgtggcttcgcatggctcgacactggtactcacgactcactctccgaagcctctacttatatcgaggttttggagaaacgccaggggttaaaagtggcctgtttggagggaatagcttaccgtcagggctggattacggaagagcgtatgcgcgagctcgcgcagccgatgctcaagaatcagtatgggcaatacctgctgaaagtcatcgacgagatcaaggaaacccataaaccgaatcttgattaaccatggaggtaattcagacggcgatcgagggcttggtcattatcgagccgaaaatattcaaggatgcgagaggttactttttcgagagtttttcgcagcgagagttcgacgagaaggtacgcaagataaacttcgtccaggacaacgagagtatgtccggctacggtgttatgcgcgggttgcattttcagcgccccccgtttacacagagtaagttggtgcgctgcgtaaaagggcgggtattggacgttgcggtcgatatccgcaaggagtcgcctacttacggccgtcatgtagcggtcgagctatccgaagagaatcatcggcagtttttcgtgccccgcggcttcgcacacggttttgcggtactgagcaagacggccgtatttcaatacaagtgcgacaacttctacacccccgaggccgacagcggcatcagcctccaagatgagagtctcggtatcgactggcggattccaatatcgcatgcaatactttcagagaaggacacgaagcacctgtgcttaaaagatttcgactctccattcgactatcgcgtaaatctttatccggagtttacataacatgaaaacaatccttgtaacgggagccaacggtcagctcggcaacgaaatacgcatcgtcgctcaaagcagttcggacagctacatcttcaccgacatcaaccacatagacggcgtagagacgacctatctcgatattaccgatttgaaagccgtacgcaagatcgtaaccgaacaccaagtaaacgccatcgtgaattgcgcggcatatacaaatgtcgataaagccgaggaggatgtagctctctgcacactcctcaatcgtcaggcacctgaaaacctggcaatcgcaatgaaagaggtcgatgggctattggtacatatatcgaccgactacgtgttcggcggagactcgtacaacaccccttataaagaggagcaacaaggcactccgacaggagtatacggttacactaaatttctcggagagcaggcaatccaagctgtcggctgcaaccacgtgattatccgcaccgcctggctttactcggaatttggcaagaacttctgcaagacaatgatgaacctgacggcgacaaaaccgcaactcaaagtggttttcgaccaggttggcaccccaacctacgcactcgaccttgcacgggcaatcgctatggtgttagagcgattcgatggcagccaaacggggatatatcattactccaatgaaggtgtatgctcgtggtttgattttacaaaaatgattgccgagtatagcggaaaaacagaatgtgacgtacagccttgccacagcgatgagtttccaagccccgtaaagcgaccttcatactcggttctcgataaaactaaaatcaaaaaggtgttcggtgtgaaaattccatattggacagattcactgaagcaatgtatctcaaatcttaaaaatcagtaatcaattatggccaaacgtaatataataatcacgggcggagcaggatttatcggttcccatgtcgtacgcctgttcgtaaacaaatatcccgactacaatatcatcaacctcgataagctcacttatgccggaaatcttgccaacctgaaggatgtggaagataagccaaactacaagttcgtgaagatggacatctgcgacttcgaggcgatttaccggttgatgcaggatgaaaagatcgacggcatcatccacctcgcggcagagagccacgtcgaccgttcgatcaaagatccgtttaccttcgcccggacgaatgtcatgggtacattatcactcctgcaggctgccaaactctactgggagagtctgcctgaggggtatgcaggcaaacgcttctaccatatctctaccgacgaggtttacggagcgctcgaaatgaaccacccggaaggcatcgaacctccattctcgacgacggcatcgtctacggagcaccacttggcttacggcgatgatttcttttatgagacgaccaagtacaatcctcactctccctattcggccgccaaggcatcgtccgatcatttcgtgcgggcttaccacgacacctacggtctgccgaccattgtcacaaactgctcgaacaactacgggccctatcagttccccgagaaattgattcctctgttcatcaataatatccgccaccgcaagccgcttcctgtttatggcaagggcgaaaatgtccgcgattggctctatgtcgaagatcacgcccgtgccattgatcttattttccatcaaggtaaggtagctgaaacctataatatcggaggcttcaatgagtggaaaaacattgatcttatcaaggtaatgattaaaaccgtcgatcgtattctcgggaatccgaaagggcactcgctcggattgatcacctatgtcgccgaccgcctcggccacgacacccgttacgccatcgactcgacaaagttgcaaaaagagctcggctgggaaccatccctgcaatttgaagagggtatcgaaaagacggtcagatggtatctggaaaatcaggagtggatggatcatgtgacctctggcgactaccaaaggtattacgaaaatatgtacaaagcccagtaagggtactttatccaagtccttccgaccacacactagacagaggtcgcgaggtcgataccgcctgtcgaaacaaataagcacgcccaaatatgatcaagtctgttgtaaaaaagattccgttcgcttttaccctttcgcaaaaaatacacgaccttcttcgaaaggacttgttacacaaacagttaaaaatcaaacgattcggggggggggtattgcaaactctccaagtatgtaaagggccgcgaaaaccgcatggaaatcgggcataattgctatttgaacggagtgaaaatccgtatcgtaggcaactacaacacgattatattcaaaaataattgcgccgtcgggcaaaactgcagcttctggatggagggaaatcatatcacaattgaaatcggcgcatcaacgaccttcacgcatacggtacatttctgtgctcaggaggacaattcgtccataaggataggggaagactgtatgttttcaaataatatcgttgtccgcaccagcgattcacatcccatatacgatttgaatacacggcaaagaatcaatcccgctaaaaatgtttcgataggcaggcatgtctggatagccccgaatacgaagataatgaagggagccaagatcggaaacaatgccataatcggatctaacaccattatcaccaacgaaatcccctgcaattgtttagcagtcggagcaccaggcaagattgtaaaaacagacgtcgactggacaagagaaaaattattttaggtatgacaaaagatttaataaccgtaacatcgcctttgcttccggatttggaagagttcaacaccatgttgaaagagatctggcgtagtaaatgggttacgaataacggtcaattccacaagcagttagaaaaagaattggccgcatatctggacataccctatgtcagcctttttaccaatggaacccttcctctgctgacagcgttacaagcattgcacatcacgggcgaggtgattaccaccccctatagctttgtcgcaaccacgcactgcatttggtggagcggctgcaaacctgtcttcgtagatatagatcctgcgacgggcaacattgatccggagaaaatcgaggctgcgatcacacctcaaacgaccgccatcatgccagtgcacgtatatgggcaaccctgcgatacaaagcgtattcaagagatagcggataagtatgggcttaaggtgatctatgatgcagcacacgcattcggggttaagatcgacggagaatctatcctgcgtgccggcgatctctccaccttgagttttcacgccaccaaagtctataacacgctcgagggcggagcaatgatcatgcacgacgaagcgaccaaaaagcgcatagactacttgaaaaacttcggttttgccggagaaacagaggtcatcgcccccggtatcaactccaaggtcgatgaggtgcgcgcagcgtacggtatcctaaatctgcgtcaagtcgatgcagcgatcgaagctcgccaacgggtagctgttcgataccgcgaagcgttaagcgcagtcgatggaattacatgcatggacgagatacctgatgttcggtacaactactcctattttcccatctttatccaggcggatcaatatggaatgactcgtgacgagttatacttcaagatgaaagaacagaatgtactgggacgcagatatttctacccgctcatcagcgagttctcgacttacagagggttaccctcagcagctcaggagaatctgcccaatgcccacaaaatggccaatagtgtcatctgtcttccgatgcaccatgcattgcgtgaaaacgatatttgcagagttctcgactgcattttgaaataacgtccatacatgaagaaaatcctattattagggggttcggcacagcagacggtcgccatacgagccgccaagaagttggggtatttcacgatcgtgtgcgactatcttccggataaccccggacagtatattgcagaccggttctacggggccagtacgacagatgtcgaagcaatatatgagatcgcccggaaggagggagtcgatggtattctcgcctacgcctccgaccctgcggcgctcccagcagccatcgtggctgaacggttgggtcttccgaccaatcccgccaaaagtgtcgaaatcctcggattaaaacacccttggcgacaattcttgcagaagaacggctttgcatgcccgaaagtgtatacatttcatccaaatacccccatcagcgaaatccaagatcattccgaccatttttccttcccgttggtagttaaacctaccgactcgtctggcagcaagggagtgacaatgcttaacaactggtcggggctcgaagatgccgttagacgagctgattcattctcacgcaacaaaatactgctcatcgaagagtatatccagcggggattcccgtcgatcatcggcggcgacatcttcgtatggaatggggcgatcgtgctgtacggcgagatggagtgcctccgggatacgctccgaagcccactcatccccatcgggaagaaaatgccggtatcgctcaccgaactgcaaagaggccgcatacacaacgaattgcaacgaatcgtaacggcactcggcgtccggttcggggagatgaacatcgagattcttctcgacaaggaggacaaggtccattttctggaattaggtcctcgtgcgggcggcaatatgatcccgatacaattaagcgatatttggggcatagacttagtgagagccaatgtgcaagccgccatgggcgaaacacctgaatttattggaacgcgccttaaagcgctccctggatgtcatatgcactatgtattgcacagttatgaggcaggtcgtttccaaaatattgacatagacgactcgatccgccgttttgtttaccgagaagtcatctataaaaaagagggggatacagtagaagtttttgatggtgcaggcaaggctttgggcatcctgttccttcatttcgataccccagaagagatggagcatttctgcaagaaccacaattcgctcataaacatcgtacttcaaaaatgaccaacaaaccgataggaggctattttgagttggagttgccccttcattcagaactgcatgcagatgcaattgctctgaacggtggtcgtttttgcctggaatatctcttgagatgcagaaaatactccaaaatttatatcccctattttacttgcaactcggcaattgaacccatcatcaaactcggcattccctacgagttttaccatattgataaaagataccgcattgttgatgatatcgttctgttagagggagaggcattgatgtataccaactattgggggttgcagagtgattattgtttggagttatcggttgaatatgacacacaattaatcctagattatacacaggccttttactcaaaaccgatcaacggcatagatacgttttatagttgccgcaaattcttcggggtgcccgacggcgggtacttatacaccgatgccaaggcggaattcgatctcgaacaagacgtttcgtacacgcgaatggattcgctgctgaaacgtatcgacctatcgcccgaggagggatatgatgatttcaggaaatgcagcgagatgttccgcaccctaccgattcgttatatgtcaaaatttactaaacgaatgatggcgagcatagattatcaagatgcaacacaaaagcgaaggagaaattacgaatttttgcatcgatcattaggtggacaaaagctgtcgcccggagacgtcccgatgatcttcccgtatataacaaaagcgggggggggaattcttcgcaaacgactgattcaaaataaagtatttgtggccaaatactggccgaatgtagatttatgggctggtgaaaacgcgactgaaacatggatggcaaacaatattctcccattgcctatcgaccaaaggtacgggttagatgatatggctaaaatcaatgaactaatctgccatgaataaactactgattttaggagcgacctatcacgagatagatattgtcgagcgtgctcacaataaaggcatatatgtcattgtcacagataataatctcgactggtcaaaaagcccggctaaatatgttgcagatgaagcctggaatattagctggagcgatatagatgcacttgttttggaatgtcgcgaatcaaaagtcaatggcatcatagcggggttcagcgaatttcgtgtggaaaacatgataaaattatgcgataaacttgggctgccttgcactttatccatgaaacagttgaatctaacaagagataaaattcaattcaagaatttatgtgcgaaatatggtattcgaggtgtccccgaatataagtacggagacagtattaattttcctgtcattgtaaagcctgtcgacagagccgggtcaatcggaattaatgtcgcgtataatcaagaggagtttgaacgattttacaaaatagcctatgatttatcgccttctaaaaatgttatcatagaagattttatagacgacggaacaaaggtagatttatactactatgtaaagggaggtaacattgcgttattagggacaagcgacacaatcatgtgcaacggaaaatcgggcgctccgattcttcaaaaagcatggacgtttccgtcccgatatgaaagccaatatgtatcggaagaagatggtaaaatacgaaaaatgctgcacggcattggattgaaaaacggatatgtcacaatgtctgcattttatcgtaacgacagattctatttctttgaagcaggattcagattaagcggagaattatcatataactattatgattatatatcgggtatcaattacatcgacacactcttggattattcgcttggcctccctaattctgatatatacgaggattgctaccaactaaataaatgcacgaaatcgataattctcaattattttggtattgacggaattgttaaaaagatacagactccaagtaattccagcaacgaatctcaaaaagttattggaaatatctacatcaaagaaggagattccatacataacgaaactaatgtattcaagaagattgcaatgtatactatactctcaaatgataatatgttagaggatattatcagatatataaattcaaatttacatatcatagacaataaaggccaggaattaatttatgaaagagttgacgagaaaagtttaaattttcttcaaatgccgaaataattaaagaccgagaggttataagacattgtagcagggaatggaagaaaattcattaagaaacaaaacaataaaaggagttggctggagtgctgcggatgcattattaggacaaggcgtaacatttgttacaggtcttgttcttgcacgtttgttatcccctgaagagtatggattagtaggtatttgcttaatttttacaaccattcttaacgggattgtcgatagtggttttagtaatgcactgatccgcaagaaagacaccaccaatgaagattacaatacgatgtttattactaatctgggaatcagtatcgtattgtatgttttattattttttgcatcttccaacatttccacattttttgaacggaaagagttgacacctctcattaaggtaatgggttctgttcttataattaacgctttgtcaataacccaaataacagttcttacaaaaaaattagattttaagaccaagaccaaaacatcgttgctatcggccataataagcggtatcgtgggaattggaatggcatatacgggatttggtgtgtgggcccttgtcgcgcaggttttgtccaaacaaaccatatatacgatcggtctatggtttttcaatcgttggtggcctgacttcagcttcaacaaagagaactttaaatatatgtggggattcggatcgaaattgatgttaagcgggctattgagcaatatctggaaccaattatatcaagtcgttgtcggaaaattttatagcccagcaactttaggacaatattctcgcagtaaagagtatgcaaatatattctcagcaaacataacctccattgttcagcgagtgtcataccctgttttatcggagatacaggacgataaaaaccgaatggtcgccgcatatagaaaagtgattaaagttacaatgtttgtaacatgcgtatgtatgatatctttaggtgcagtcgcagaaccattgatatattgtttgattggtcccaagtggcatgaagcggcaacctatctaccattaatatgtattagtatgtccctatatcccctgcatgctatcaatctgaatatgctgcaaattcaaggacgtagtgacatttttctatatctagatttgataaaaaaggttattggcttatttcctctggctatcggcatattcgtgagtatctatgggatgcttattggcagcattgttacagggctcatctctttctttttaaattcttattacacgggtaagaggctcggctacacttcgaggatgcagctgcgagatgtttcctcaagctatggagttgcatttatagtggctgttgcagtgtatttcctgaaatacctgccgttgtcttattgggcgattctaccgttacaaataggtgtaggtataagtgtactcctttgcatttcagaatatttcagaattcccgaatttatagaaataaaaacgattataaaaaacctcaacaaaaaatgaataatccggaagtactggttctgctatcttcttacaacggagaaaagtacattaaggagcaaatcgacagtattctgacccagaaaaatatcaccgttaagctgttcatccgagacgacgggtccacagatgcaacgcggaacattctaaaagaatatgaaaaatactcaaactgtgtcgtagtattcggagataatatcggcgccgcaaattcttttttgtggctaattcaaaatgcccattcgagcggctattacgcttttagcgaccaagacgatatctgggaccgagataaattgagttctgcgatatcgatcatcaagagcaccggctcgaccctatatcatggattcgccggcaaggtggataaaaatctgaataaaattaaagacgattcccatacacccgccgattcattcggaggttctttactcgagtctgccacgggttgcacgatggtgtttacaaaggcattgatggataaattgaagagctatcatccccgctatatctccatgcacgatgcatgggtatatcgcgtgtgctacgcattgggatatagcgtgtattatgattgcaactcgcacatgaaatacagacaacatgaaagcaacgtatcgggcgggcaaatgtcatacatgcaaaaaatagcaaaaatcaaaaaaaacagaggagcaaagtacaatgttgcgcaaagtattaaaacatgttgctggcatgatatgccggaacagaacagaatcatattacaagcatttctcggctacaagtgttctttctacggaaaattacgggtcatgatgaatcctcaattctccctaaataagacccgaaccaacattcaaaataaaattcttctgatattcaatttaatatagcatctctgatggagtcgctacttctctatttatcctcttttttgtactctgtactatgggcgcgccattatcagcgaagagatcgcatcagacctcgttcgcagtctactttttcccaagtttcgtgggcattcatcattatgctgtttccgataatattgagttgttatcggtatgggataggtgttgattatgaaaattatgtttctttattcgaaaattttcattcgtcaacatggacttctttttcagaggaaaacttatcctttgaatacgctaataaagctctttcggacttaggcttttatctcactggagatacgttcggtgtttttggggtttacgccgtactgacactggttttgctcgaattggcgctaattaattacaaggattatatttcgctcccgatagcgaccttcatcatgcttctgctgatgtattcaatgtcattgaacatcgtgcggcaggcccttgcgatcgcagtggttttctattcgctgaaatttatacaacagaaaaaaccgctatactatttcataggttgtcttttcgcaactggcatacattccacggcttttattacactttcattctacttcctgaaagatgcggacaatacaaagtacaaattcctgttcaacaatgtcgtaaaagttattatcgtcctcttcccactactgtttacattgctgataggacagcttcagtcttatgtgttgctcgagaaatattttgacaattacgaccaggaaggagccagtattatcgaatcttacatccttaaactccctgtgttaattccgctgctgctcaattataaaacattgagtaaaaataaacacgccaaatttctgtattatctttttgcgatagagctgattctgttgtccatcgcatcgatatataaatgggcgttccgtctgtcgtattactcttttatcgggcagattttactggtaggcatgctcgtcaatcagaaaactcatagttctgcactatataagccctttttctgcatatattatctcttatacttctacctcttatttttcgtttggggccgagacggcatcttcccatattcacatataaattaaatcggaatggagaaaataggtatatgtactttctataataacaataattacggttcatatttgcaaacattcgctctcgaagccgtcataggcagtatgggctataacgcctacttaatagattttaacgattataccaaaccttggaacaggcagttgcgaaataagacgattttctcgaggataaaatgtatcttatttcaccctcaactattggtagaagctctaaaagcgaaaatcgtcagcaaacaatcgacgaaatgctccactgctttaatccgtaaattcaaggacttcctggcggagaatctgaaccgttacgagggtaattacgttaaagacaatttcaaggcattcgttgtcggcagcgatcaagtgtggaaggtctcattaccaggactgcattcagtgttttttcttcgtttctgtccccctgcaaagcgtatttcatacgcagcgagtttagggggagactcgattcctccttataacgccaaattatgctatcgatacctcaaggaattcaaggccatatctgtacgggaggattctgccgtcacactactcgaaggcctgggccctgatattcaccccacgcatgtcttggatcctgtattgcttgtcggaaaagatttttggaagagatatataacgccgcatactgacccacaatatctcctaatgtactttctggattcagtatcggagcacgaggatataattttagcggccatagcgaagtacccaacccataaaattcggatgattaccactggtgtccaaatcaattccatcgaaaatatagaatatatagaaccttcaccgcttgaatttgtatccctaatacataatgccgagtttgtgttgacagattcctttcacggctccgcattttcaattttattcgacaaggaatttatcgtcttaccccggaattacaaggttttctcgggacaaagtgcgcgcattttttcactgttagccatgtttgaatgtagggaccgatatgttacagccgcagcacaagtctcagagatacgttctatcaatggacaaaaaacggaagcgatactgcataagatgcaacgaacctcaacgagtttcctggcaaaggcgatcaacgagtagatcatgagtaatgtttatgcatatcgtagcttagtggattttcaccgaacctcgaccagcggcggagcctttacccaacttgccatgaacttttttgcgcaaggcggagatgtcgtttacggggttgtgctcgatgaaaaccttgctgtaaggcatcaaagggcctgcaccttgagcgactgtgagaaattcaagaaatcaaagtatgtccaaagcgacctgcgaggtatttttcaatcggttacaacagatatttcgaaaaatctgaaagttctattcaccggaacaccttgccaaatcaatgcgctttatacttatttagataaattgcatctgccccacggacaggtttacacaatcgacgttatttgcaacggcgccccaagcgccaaagtgtggacagattatacgtcatggttggaaaaaaaggtaggtaaaaaattaatcggcttcggtttccgagaaaaaggcgatccgtataacccataccagacaaaagctgtctttgcagacgggtcggttctcgtcgatactcccgaaacggcatgctacaatcgactatttctaaaaaagctcataatccccaaaaagtgtttcggttgtctatttaagagagaagaacgtgtgtcggatatcacattaggcgatttctggggttgtgaagatattttctcagatacccggttacatagcggggtatcgctggtgcttatcaactcagaaaaaggggccagattattcgccgataagaaaagcgataagaatgcgatcgtagaacgatgcatcgataaaagctacttaaaataccaaggcaatctgcgacaggttacaccccctccgacagggtacgacgatttttggacatgctacaagaacaaagggtttggatacgtggctaacaaatatgcggactctgattttccgaggtcgttaaaatacagaatgcgccattattatagattattaaagcatcggctgaaataaaatgaacgatataaaagtcagcgtatgttgtttcacatacaaccacgctccatacctctccaaagccttggattccgtcctctcccaaaagacaaacttcagatatgaaattatcatcggagacgattgctcgaccgatggatcgcaggacataatcaatgcatacgcaataaagtttcccgacctgataaagaccatctaccagcccgttaattcaagaggcaaaaaaaacttttcagacgtatacaaatcggcagaaggccagtatgtcatcgccttggaaacggatgattattggactgatccgaacaaattacaaattcaagtcgattatttagaccgccatccggcttgtattgccgtcgcccacaactgtgtcgtagtggatgagcacgatcgacaactggcgcgaaaatatccggcgatcgaccagggggtatatcgatacaaacattttagaaaagggctgatgcccggtcaaacgacgactgtcttgtatcggaatccaaagtttgtagagaatctggacatgagcctgtataacaatcccatctccggccccggtgacagcagacggttattttgtcttatgacggcaggggacgtcattacactgccttacacgatgtcggcctatcgttatgttacttcaggcgggtatagcttctcagccaaccataaaagggacgacaaatctgcgcttctgtttttcagggaatttcaaatctatgccgacaaatttacaaacaaaccgatgagattggccgcagacgtgcgattgatgcaagtagctttgggggccttaaaacacagacaaatcgatctaaaagagtggatacaatactatcgttcctgccaatttccgttcaaggcgttaatttgtgccgcggccaaaatcatacagcacaagttaaatcgaaataactaacaatcagagcctatcaagatatatgagtaaagtgtctgtggttatacccatgtataatagcgaaaagacaatcgaacaggtattgggttccgtcatatcgcaaacagctatatctgaaatcgccgagatcatagtggttgacgacggatccacagactcgtccgctctcttggttgaagaatttatccggacccacccaacgtcctctatactcctgatcagacagccaaatggaggtgtgtctagtgcaagaaatcatggcatccgaatagcaaagggcgaatatatcgccttattggattcagacgacctatggatgccccagaaaatagagaggcaactgcaaattctcaataacaatcctgaaatagtgttcctgggttcggcgtattatctcggtttgaaaaaacaagcagtcaaattaacattgccgtggaggaaaaccgatcggttgtttaatgcaaccctgacagacatttatttcaagcactttcccacgacgccatcggtgatcttcaaacgctctgccgtcgatacggtaggctatttcgatgagaaccaaaaatatggagaagacataaactattttcagagattctgcatctattttaactattactatttacccgagtgtctcgttcatattgcctacaataaagcctacacaggctccgaaggcttgtcttccaattataaaaagatgcatcaggggacgctgatcaaccttcgacagctacatgctgacggtcatttcggctctataaagtatctatgttttagaatactattcgagctgaaatattggagacgaatacttattcggttcatcgacaaattccaatacaacagacactgtaattaactgtaataaatccatgaatagtcctattaaaaacgaatattccattcgggagaaatttcaattaggatggtggttgctgaaaaccaaactacttaaccccaaagcccgtcttatccgtttcccgttcacaatccgagggggggggtacatcgacttaggcaaaggcctgaccacaggtgtaggttgtcgtttggaggccttcagaatgaacgatgaccgccacaaaagaattattttcggcaacaatatccagatgaacgattatgtgcatatcagtgcgatagaaaaagtcgagatcggaagtaacgtattaatggcaagtcatatatacatatccgacaattctcatggtttttacgagggcactgcaaaagattcttcgccatggattcctcctcaagagcgcgcctacttagtctcgcctgtgaagatcggggacaacgtatggattggagagggagcgatcatcatgcctggcgtcgagatcggcaacggctgtgtaatcggtgcacatagcatcgtaaataaaagtatttcatccgggtgcatagtagtgggtgcaccagctaaagtcgtgaagaaatggtcccccgatactcaacgctgggagaaatgtagccccaggaattaaacaggctacttgactgtattcggtgcaataccccattacgtctattgaaaatgctgaccgcttcgatcgtcatctataaaacgcaaaaggaggagtttcggaagatcgtggagtgctccttaaagagttcgattcacacgatttttatcgtcgacaactctccttccaataaactgcaagaagttgttgcaagctatcgctcttcaagattaatatacatatggggacaaggtaatattggatatggcgccggccacaatatcgctataaataagtcttttgaatcggatgcaaattatcacataattctaaatcccgacgtaattcttcagccagaagtaatagaatcgttatttctgtttatggaaaaacattcagaagtaggtgccgtaatgcctaatattatatatccgaatggaacaccccaaagactatgcaaactacttccaacccctttcgatattttcgcaagaagactcttacctaaatcgtggacaatcaagcgtaatagaaggtatgaaatgcattttatgggatatgataagatttggaattgtccgaatctttctggctgttttatgtttttacgaaacagtgtattaaaacaagttggcagtttcgatgacaaattttttatgtattttgaggataccgatcttatcagaagaatccatcgggttagtaaaaccgtattttatcccaatgcaactatcattcacgcacataaagccgaacatcgaacaagcaagcttttgttaaaaatttctgtcaaaagtgcaattcagtatttcaataaatacggatggatattcgacaaagaaagaagaatttacaatagacaagcgcaaagaacggaatcctgcatttcaaagtaatccatgaagaaaagttcgataaatacatttttaaagctgattcaaataagtctcggaggagaatttcatgattttccatcattagatacggcagaatggcaagagctatttattttagctcataaacaggcaattgtgggcattctctcaaacattgtcgaaactcttcccgccgataagcgtcctcctcgtgaaatattgcttaaatggatagtgactgcggagaggatcaaacacctaaaccagcatctgaataatacagtcccaaaggttgagacgttattcaaggacaatggttttcaagggtgcatattaaaaggccaaggtatcgcgcaactataccctcatcccgaactacgcacaccgggagatattgatatttgggtttgtggtcgcagaaaagagataatctcatttgtcaaaaataaatgcaattcatcacacgcagtatatcatcatatagacggacttaaaatggatagtgtgaatatcgaaacacatttcaccccatcttatatgtccaatccttttgcaaaccgaaaattgcaggcgtggattgcagatatctcctcccagcaatttgagcatcgtataaaaattggagaaaacagcatccatgctcctactttggcttttaatagagtttttattctgcaccacatatataggcacttcttatacgagggtattggcttgcgccaaatgatggacttctattatgtactcaaacaaggatttaccgagatagagagagacgaaactatcaatgtgtataacaatctaaacctattggggtttgcaggtgctgccatatatgtattgcaagaaatatttggattggaagaaaaatatcatattgtattaccaaatgacaaatacgggaaagtattactctccgaaattttaataggcggtaattttggacaggctatcacccgaacaaagcatactgattctaagttccaaaggggatggcgaatactaacacgaaattggagatttattcaatatgcgccctccgaagtactgtggatgccgtattttaagataatgaacaatctgacttatgtaaaatcctataataaacttcgccataaaaattaacttattgtcattcatgctcctaccgtctataaaagataggcaacaaattgtcagagcgtagtttaatttcaatacaactacatgaatatcgctggatttatagccattcttgcttgatagcaaaaaaggtttagcccccctctattatccgaatataaaattaataactgggaaatataaatgcggatatactgttaactcctcctgacaaatgattgttacaattttacaatagccactgatagagcaaataacattgtacgtctatccatcatagtagacttgtacacccacaggatagacaatgtgtctattatagctgacaatatttttagctatctttttcccatttcgtcgtttaccaatgggatgttacacaatgttcatcttctcttgttcttcggtctaaatgaatttgttcgtctttgtcatagataagctgctgcaatgttccagaataaataaatcattatttggaaatcttctatacatatctacggtggaagacttctgcaatggtttcgttatgctgcgaatttaccgtccagtcgggattcgacacgatcgatcgcatcctcgatcattatcggcgtagtctgcgcatagatctgtgtcgtggtgatctgtttatgtcccagcatcttggaaactgttgacaaaggaataccctgtgaaaggcagagtgtcgtggcaaacgtatgacgtgcgcagtgaaaggttatgtgccgtgagataccgcactgtttggtaatacgacgcaaggagcaattgatactgctaagtttcggcatgtcgaatgcaagcggtgacggagctgttccgcgatatttttccagaagacgcaaagccgcagggagaaatttgaccatatattctccacccgtcttgcagcggttaccgtgtatccacaggtgcccctccgagtccggtatgatttgttcacaggtcagatagcgcatgtctttgtagcagattcccgtaaaacaggaaaaaagaaacaggtcgcggtggtattcgtgtttggcactcttcaatcgtgtcgtctgaaaaagccgtagctccttctcgctgagaaaagttctcggttccttcggagcggaataactgtagaaagcgaacggattacgcggcataagaccgttgttgaacgaaattttcaccacgttattcaaacaatctatgtagcggcatgcgctgcccgccttcaaatggcagacagttttcaaatagacgtggtattgctcgatgaacgactgttccaattcgagcagcggaatatcgtggaggttgtactcgtgtttcagaaaggcccggagatgcccgagcgacgcccgatagcgccaccaggtactttctgagcgatctacgccgatacgtttgaaaagatcattcgtgtaatgttcgaaaacattcacaagagtccggtatcgttcgcccatacccagccaggcattcttgaccttttcagccgtgacgtaggcatcgtgatcgcaaatcgactgatagtgtttgccgatctggatgcggatattgtccagatggcggttgatgcgttccgactcgacgcttttgcctttggctcggccgcctttaacctcccacagttgttccggaacgttgatcttggcgctgaactgtgaaatcgtgccgttgatcgtgatgcggcccataaccggatagactgcacgcgaggtgttctttgttcgtttgaggtagaacaagaccttgaaagtactgcgcataaactctgcttttttaaggtggacaaaaataatttcggcagagtcgtccgacaagatgaatataagcgtaatagactgtaaataaccgttgtatgtaaccgcaggcatcccaaaacaaggtaatgatttggaaacgcaactctcggttatttatgcagaaagattcacattctctcgatatttcaataccgacatgatgaataacaatctgaatatcagttattatacttcgatttgctttttatagatagccgttgtacttttgtgtcaaaataaatcgaaaccatgcaacgaatcatatccccctcgatgctgtcggccgatttcggccacctggagcgcgatacgcagatgatcgaccgaagcgccgccgaatgggtgcatatcgacgtcatggacggcgtattcgtccccaacatctcgttcggattcccggtgatgaaggccatccgcaaggccacgtctaaactgctggacgtgcatctgatgatcgtcgaacccgaaaaatacgtcacccgcttcgccgaggcaggcgccggaatcgtcaccttccactacgaggccacgctcgaccccaaagggtgcatcgacctgatccaccgcgcaggcgccaaagcgggcatttcgatcaagcccgccacgtctgtcgaggtgctgcgcgacatcgtacccctgatcgacctggtgctcgtcatgagcgtcgagccgggtttcggcggacagtctttcatgcccgactcgctggagaaaatccgggagctgcgtgccatgatcgacgaaacggaatccaccgctgtgatcgaagtcgatggcggcatctctgcccataactcgcgcctgctcttcgacgccggagccgacgccctggtcgccggcagcgccgtcttcggcgccccggacccgcaggcggagatcgagagaatgttgcagagctaacctccgactcctttcacccaagcacctacttccggtaagccgggcgttccgcacgcacggaaaatcgcagaaaacgaaaccatgatctctttagacaatctcaccgtcagctacggcggctggacgcttttcgacaacatatccctgctcatcaaccccaaggaccgcatcggcctggtcggtaagaacggcgccggcaaaacgactctgctgcgtctgatcgtgggcgaacagcagcccacctcgggttcgatctcctacaacggcgaatgcacgatcggctaccttccgcagcagatgcgtgtagcggacactacgacactcgtcgaagagacggccaaagccttcgacgaagtgctgaaactcgaagccgaaatcgcccgcctcacccgcgaaatcgccgagcgcaccgactacgaatcgtccgactacgaatcgctgctccaccggctgaacgaagcgaccgaccattatcacattctgggcggcgatacccgcgaagcggacatcgagaagacgctgctcggtctgggattcaagcgcagcgacttccagcgtgccacgagcgaattttcaggcggctggcgcatgcgcatcgagctggcgaaactgctgctgcgccggccttcgattttcctgctggacgagccgaccaatcacctggacatcgagtcgatccagtggctcgaggattacctgaaaaactacaacggcgcggtgctgctcatctcgcacgaccgcgcctttctggataacgtgaccacccgcacggtggagatctcgctgggcaaagcctacgactacaaagtaccctactcccgatacgtcgtgctgcgtgccgaacggcgggcgcagcagatggccgcttacgaaaaccagcagcggatgatcgaaaagaccgaggagttcatcgagaaattccgctacaagccgaccaaatcgaaccaggtgcagtcgcgcatcaagcaactcgaccgtctggagcgtatcgaggtcgaggaggaggatcttgccacgctcaacatcaagttcccgcccgccccgcgttcgggacagatcgtcgcagagatcaaggaggccgggatgtcgttcggctccaaacatgtcttcagcggagcgaacttcaccatcgaacggggcgacaagatcgccctggtaggccgcaacggagaaggcaagaccacgctggcccggatgatcgtgggacaactcacgcccaccgaaggttcgatccgcgtgggagccaacgtaaacatcggctattacgcacagaatcaggaagacctgatgaacggcgatttcacggtttacgacacgctcgaccgcgtagccgtcggcgacgtgcgcacacgtctgcgggacattctcggcgccttcctgttccggggcgaggacatcgacaagaaggtcaaggtactctccggcggcgaacgcgcacgactggcgatggcccgtctgatgctggagccttacaacctgctgatcctcgacgagccgaccaaccacatggatatgcgttcgaaagatattctcaagaacgccatcatgaaatacgacggtacggtgatcgtcgtctcccacgaccgcgagtttctcgacggcatggtttccaaggtttacgaattccggaacggcggcgtacgcgaatacctcggcggcatctactacttcctcgaaaaacgcaaactggaatccttgcaggaggtggagcgtaaggacgctcccgcgaaagaggcggcgccgaaagccagctcttcgggcaagctgacctacgaacagaagaaagagcaggaaaaactcctgcgcaagctccgcaaggcggtcgaaacgatcgaagcgtcgctggccgatctggagaagaagatcgcggattacgaccgcaaattcgccgaagcgacccaatacaacgaagccgactacaaggcttacaacgagttgaaagccgaatacgaccaccagatgcacgaatgggagaaggcgtcgtacgaactggaaatcaccgaaggagagtaacgatcggagccggaagaaagccaacagcaccatgaaagcacttatcctcaacggatcgccccgtccgcagggagttgtcgtccaggcgctccgcaccgccgccgacaccttgcggcaggccggagccgacatcgaatggatcgacgcttaccggatggaattccgtccctgcacgggctgtatgcagtgccgcacgacgaacatctgtccgctgccccgcgatgcggcccatgccgtcggcgaacagatccggcaggccgatctgctcgtggtggggactccgacctactggggcggtatgtcggcccggctgaagatgctcttcgaacggctcgttccgattttcatgggcgaatcggctctcggctttccgcagccccggcaaaaaggcaaacgtgcactcgtcatcgctgcctgtacgacgccctggcctttcaacatcctcgcacggcagagccggggtgccgtccgttcggtccgtgaaatattgggtacgggagggatgaaagtccggacctgcgaaatccccggcacccggaaaatgaacggcaaactttccgaaaaggaggcccggcgaatcaccgcacgcacccgcagaatcgttcgaaaaatagaataaaacttttggcgacatccgattcgactgtccggataaagaacaccgaaaagcatgattccgggcccgatccgaaaagccgcacgacaaaaagacaaaaaaaatcaactaacgaaccaaccaataccatgacggaaaaccttgtattcggcatccgccccgtagtcgaagcgatcgaagcgggcaaacagatcgaaaaactctacattcgcaaaggcgccgaagggcagttgatgaccgaactgcgcgacctctgcctgcggcatcgcatccgcacacaggaggttcccgtcgagaagctcaaccgcctcacgcgcggcaaccaccaaggcgtcgtcgcccagatctcccccatcggctacgtcgaactgaacgacattctggaacgggtgcccgaagacgagacgccgctgatcgtcctcttcgacggcgtgacggacgtgcgtaacttcggagccatcgcccgctcggccgaatgtgccggaacgcacggactgatcgtaccgctgaagaatgccgctcccgtcaattcggaggcgattcgttcgtcggcgggtgcactgaccgccattcccgtctgccgcgtcggttcgatccgcaacacgctcaaagcgctccaggcagaaggctaccaggtggtaggtgctacggaaaaaagccgcaagctgctctacgacgcggatttccgcaagcctacggcactcgttatgggcgccgaggatacgggcatttcgaaagaggtgctgaagctctgcgacgaacagctggcgatcccgatgatcggcaagatcgagtcgctcaacgtctcggcggcagcggcagtactgctgttcgaaatcgtacgtcagcgaatcggttaatcctgccctccaacctctcgacacgatgtccctgctgcgcgacttattcgacctgttccgctccgagccggatcatccggcaacccggaatccaaaatcgaagcccgcgaccagaaaacccgcccgcaggcaaaagacgatcgtccatccgatagtcggagaggtgaccctctcgcaaagccgccgggcacggcggatctcactctgcgtaaggccttccggccccgtccggctctcctacccttacggcgtctcgaccgcccgggctttggaatttctggaaagccgcatcgaatggattcagacagccagggatcgaatagccgaacggctcgcccagcaacctccacgccccaccctttcgcccgaagaagaactccgccggcgggaacagttgcggcgcgaagcgatggttgtactaccgtcccgcgtagcggaactcgcagtgcgaaccggtctgcaataccgttcggtaacgatccgggccacccgctccaaatggggctcctgcaacgggcgcaacgacctgtcgctgagcctgtacctgatgacgctgcccgaacatctgcgcgacttcgtcatcctccacgaactctgccacaccgtccaccacgaccattccccccgcttccatgcgctgctcgaccggctggtcgggggtaaagaaaaactcctcaacaaggagctgaggagttacagggcctattgagtaaaaattcacgatcgaatcttcaaccgctctttttctcttctcatccgaagcagaaattcgatataaagccactcgcacacaaatacaaaagaaataagaggaaccgcaggcagctcctcataatgacgggtaaaaagctgacagatcatccaaccgacaaggtaatctccgaaaagaaacagtcctatccaaaatatcagatcaaaaatcgaagggctattctcccgaatatactcccgtttcagccgcagacacttcgcgtaatcgatcttcagtatttttactttcaatatctcgccgaagtgcagatagtcgagttctctcaattcataatattttccggcctttgcccggctaaatttatatggatgacccgataggcaaacgaaagccctttcccacagaattttacaaaaacctcgatacagccgatctcttcggccgcgatccgctttcggacaaaaagcaacggataagatacggtaaaacccgcctcatcgaacgtgaacgtacgaatacgaagaaatgcgaagataatagcggcccagagaacgacaggcattaaaccaaaacaccagtctgcccccgaaagcagatcctcaccttgcgcgagatccgaataacaaagagcgaatataacgatcaggctccaaagcagagtgatataggccataaaaatataagacccgatcgttattctacgcaaccgggtacgcattcccttctataattcagaataacttctttttcgaccgggtgacgacgaaatccttcaggtagaaaggctcgaagtacgcgatatcctccgtgcggcccgcatcgagcgcctcctgtgccagccgcgcaagccctcgggcagaaggcgccacctggatcagcgtcgcatcgggcagcaatccggcacatttggccgcaccgtttccgaaaatcacgaaaggacgtccgtctccgcgccatgccgcgaaactctccgccgtaacgacctcggcggatacgtccgaaagaggagttcccgcagcatcgaatacccgggtataaacctccatgcggcgggcgtccaccatcgggcagaggcacgcctcctcccagcgatcgaccgagagaatccccgcttcgtaatcctctttcgcaacttcggtcagggcatccagggaaccgatcgccaccagcgggatccgcaacccgtagcacagtcccttagcgaacgaaacgccgatacgcagccccgtataggagccgggccccttgccgacagcgacggcatccagctcttcgggagcgatcccggtctgcgacagcaattcatcgacgaaaactccgacctggcgggcgtggtcgcgcccctgatcgctctcccggagcgagatcaactccccgtcccgggccaaaccgaccgaacagatgtccgtgccggtttcgatacatagaataagtgacatatcttttttctttcgtttttcaatccaaacacctccggcagaccttcgcaccgacattgtcgccccctccctgaagcgaacgggaagcggaatgatcgccgaagtccgcccctcgggatgcgaaccgtttctccgatccgaaaagccgccgcagggaaaccgctccctgcaaagcgtttcgaatagccgtacgatccgattccacccgacagcaggcagcggcaggacgatcggccccgggatgctctccgaggttacgcccgatatttcttcatcgccttgtccatctcgcgcttggcgtcgttctccttgaggtactcgcgcttatcgtaggccttgcgcccccgggccagacctacgacgaccttggccagcccccgctcgttgagaaagagccgcaagcccaccacggtcaatcccctgtcctgcaatgcccgctgaatcttgttcaactccttgcggttgagcagcagtttgcggtcgcggcggggaacatgattgttgcaggtcccccaaccgtactcggcgatattcacgccccgaatccagagttcgcccttgtcgaaataacagtagctgtccgtgatcgacgccttgcccagccgtacggacttgatctccgtacccacaagcacgatgcccgcgatccactcctcgataatttcgtaatcgaaggtcgcgcgtttgttccgtatgttaatattcttataatcggccatatccaatttctctgtttttccgccggaacctctgttcgggaaccgacgatccggcaccatatttgattaatcaaccgcagagggtgtccgggaaagataactaattcttttatctttgtagaagataggatgcggctcggcaatctttgcgtgcaaacgcgcatgactgctctcgcctttgactatctttgatatgttttacacatctttctgtttattttctgtttgcacacggtatgcatagtgatacgtgtacgcccggacccctctttttacagaatcaaccgatgcaatttccgggcaatcgaaacctttcccctgttcaggttcgacagccgctgcataatgtcctgcatctcgtcgtccgtaagattctcgtcctgaagtttttcacgaagctcccgcgacatccgctcgatcaccttcgacttgtagagcgtcacggccttcggcactccgacagccagcatctcggcatcgctctcgacatggacctccttgcgccgccacaattcgctcggaacgtaatgatcctccgaagtaaggatatccaccgacacgttgcacacctccggatcggagtgattgataaagtggtggatcggcacctcgacccccaatcccaaagcgcaccactgttcgcggtaaacccgcagaatctcattgaagacccggttctggaactccaaaccgtcggcgtccaactccccgaaaattacctcggcgacattatattgaacgacattccggccctccttgaaatcgaacgaacaatgaccgtacttgagcagataacgcgtcagctcccgttcgagcgcttcggcactgctgcccccggtcacctgtcccgcaaaaaccgtttcagggcgctgcgcagtctgctcggcacgaaaacgggcgctctgacgccgcacgaactcctcggcttcgcggtcgcccgtggaagccatacgcttgcgccccacttcggcaatcagcaggttctcgtcgatgtccatgatccgtgcgcactccttgatatagaccgagcgctggatcgggtcgggaatctgcacaatggattgcaccatgtcgttaatcaacgccgccttcttgatcgggtcgccggcagcatccttcaacagtagcttggccttgaacgtcaggaaatcctcctcgttggcccggatatactcctgcacctccgcagccgtatgggttcgggcgaacgaatcgggatcgtcttccggcggaagcagcaccacacggacattcatcccctcgcgcagaatcatgtcgattccccgcagcgaagcgtgaatacccgccgaatcaccgtcgtagatcaccgtgatattcttggtaaaacgtccgagcagacgaatctgttcggtcgtaagggatgtaccggacgaagccaccacattctctacccccgcctggtgcatcgaaatcacgtcggtatatccctcgaccatgattgcgaaatcgtactgctggatcgctttcttggcgaaaaacaggccgtacagctcgcgtttcttgctgtaaatctcgctttcgggcgaattttggtacttcgcaaccgacttgtctgtacgcagcgtgcgacctccgaaagccaccacgcggccggaaatgttatgtacggggaacatcacccgctcccgaaaacggtcgaaaagcgtaccgtcgtcccgcttgatcgaaagtccggtcgaaaccagaaactcctccttataaccggcagccaaagccgcccggctcattcgatcgcccctggcgggacagaatccgagcccgaacttcttgatcgtcgcatcggaaaatcccctcttctgccggaaataggtcatgccgacactcatcccttcggtttcatggagcaggtaattcgaaaaatactccgccgcccaactgttcacgacgaacatactctcgcggttatcgttgcgggcgacctcctcgggcgtcatctccttctcccgcacttcgataccgtaacgcttggccacggctttcaacgcctcgggataagtcatattctcgtgctccatcaggaacgtgacggcattgccgcccttgccgcagccgaaacacttgtaaacccccttcgagggcgatacgacgaacgacggggtcttctcgttgtggaacggacagcacgcctgataattgacaccctttcgtttgagcgtcacgtattcgccgataatatccacgatattcgcagcggcgtaaatcctatctattgtttcccggtcgatcatctttgcaaaggtacgaataattcaattattacggattacatcaagtacttattcgcctcttcgaggcgatactcaggagaacattcgaatagatagttcagtaaattcagatgccccgctccgaaaataacgaggatcctgtcggacggccccgtttcgatccgttgaatattccggaatatccgcaaattccggttaaaccaccttcccgtttcaaaatctacaccgatataatcgttcgagaagaattcatatttgaaatgaccgatcaagtaattacccagactacgccgaatatgctccgggtcgttcagctcgataagttcggcaataattccctgctccttgaaaacagcttcgggcacaaaccttttaatagaatccggatggtcgtaaaaactggtttcgaaacggatatactccttactgttttcatcgcgtaataactcatcgatttcgtcatagtgctttccccattcatctacgcagtaaatccggtctatccccagccgttttgccagccggaatccgatctgctcgtcttctcctcgctgcaaatcataacagtccgccaaatatcgacggaacagagagtccgtctcgaactgcattttaaccggccgttcgataacgataatcgttggggcaaacttctccaacaaaccgaccaatgtttcgatctcattctggtaaaccgggttcaggacatctatttgctcgctttcggcatactgcacctgatccagattgggaaaatcgaaatgaaaggtacctaaagtgagtaccggaacaggctcttgtgcagcggcaaaacaagccgacaaaacacaaacgatcaaaataattatttttttcatgtcgtatattttttccgccgcaggaaagattgttcgcaaaactgaatttatacaaaaatacatgttttacataaaacatattctattacactcctgaaaaaacagaggcaaaatatattctgtttttgaacgttaattttcaattatcgttatctttgccttatggacttcaaattggtatccgactatgccccgacgggcgatcagcccgaagcgatcgcacagctattggcctcgatccggcacggctcgaagcacaatacgctgctgggcgtgaccggttcgggcaaaactttcacggtggccaacgtcatcagccagctcaaccggccgaccctcgtattgagtcacaacaagaccctcgcggcacagctctacggggagttcaagaactttttcccggaaaatgcggtcgaatacttcgtttcctactacgactattatcagcccgaagcctacctaccttcgacggatacctatatcgaaaaggacctttcgatcaacgacgaaatcgaaaagatgcgtttgagtacgaccgccaccctgctctcggggcggcgggacgtcatcgtcgtttccagcgtatcgtgtctgtacggctgcggcaatccgagcgatttccactcgatggccattcatatcgaagtcggcgaaatcctcaactacaagcagttcctctacaaactggtcgaagcgctctatacccggaccgaacgggaactgacccccgcgacattccgcgtgacgggcgacacgatcgacatcatggcggctttcggcgaattcggcaaccagtgtttccgcgtcacctttttcgacaacgaagtcgagagcatccagagcatcgaccccgtaaccggccagcggatccaaacgctcgacgcactcaccctttacccagtgagcctgtttgtcacgaccaaggagcgcatacacacggccgtgcagcagatctacctcgacctgggcaagcaaatcgccttcttcgagcaagcgggacgtccggccgaagcgcagcggatcaagcagcgggtggagtacgacctggagatgatcaaggagttgggttactgtcccggcatcgagaactactcccgctatttcgacggacgtgcagaagggacgcgacccttctgcctgctggactattttccgcaggattacctgatggtgatcgacgagagccacgtcacgctcccccaggtgcacgccatgttcggcggcgaccgcgcccgcaaggagaacctcgtggagtacgggttccgtcttcccgcagccaaagacaaccggccgctccgcttcgaggagttcgaacaactggtcggcaccacgatctacgtgagcgccacaccggccgactacgaactgatgaagagcgaaggagtgatcgtcgaacagttgatccggccgacaggactggttgatcctccgctcgaagtgcggatcacggacaaccagatcgacgacctgctggaggagatcgacaagcgggtacgcaacgacgacaaaatactcgtcacgaccatcaccaaacgcatggccgaggagctctccaaatatttcgaccgagtgggcgtccgcaaccgctacatccattcggacatcgacacgctggaacgggtgcagatcctcgaagacctgcgggccggcatgttcgacgtgctgatcggcgtcaatctgctgcgcgagggactcgacctgccggaagtggccctcgtggcgatcctcgatgccgacaaggagggattcctgcgcaacgtgcgttcgatcacccagatcgcgggccgtgcggcgcggcattcgaacggcaacgtcatcctctatgccgaccactgcaccgactcgatgcgctacgccatcgaacagagcaaccgccgccgcgaaaaacagatgcgctacaacatggagcacgaaatgctcccccggcaggcgcagaaaagcggctcgggacagagcaccctgctggcaaatacggttcagacacccgtcacggatggaattatctaccccctgcccgacaaccggcagacgctggccgcagacgttacgtcggcctactcgaccgagagcatcgacacgcagatcgcccgggcccgggaagagatggagcgtgcggccaagtcgttggactttctggccgccgcgaaattccgcgaccgcatgtacgaactgcaaaaattgaaaaacgaaaaatgaacatatcagcatacatctcggaactgaacagacaatacgcctctggaaatgcaacggaacacagttatcgtcccgcattgaagtcgctgtcggaaacactgctgcccgacctcacgatcatcaatgaacccaagcgcacggcctgtggtgcaccggactatatcctactgcgaaacgatattcccgtagctttcatcgaggcaaaagatttcactcagacacaagaccttgcgggacaaaaggagaacaaggagcaattcgaccgttataaacattcgctcgataacattattttcaccgattatctcgatttctggctttacgagaagggcgaatttgtggacagcgttcgtttggccgaaatcaaaggaggcaaaatcgtcgccgtggaaggcgccgaaacgaaattcgttctcatcatcgaacgcttgggcaaagccgtcccgcaaagaatcacgtctgcgaaacaattggcccgaatcatggcggcaaaagcgagactgatggccgacgtcatcgaaaaggcgctgctgcaagacgatagcgacagcaatctcaaagggcagatggaggccttcaaagacatcctgattcacgacatcacgccgaaagaattcgccgacgtctatgcccaaactattgtttacggtatgttcgccgcgcgtctgcacgacacaacccccgatactttcagccggcacgaggcggcgacgctcatcccgaaaacgaacccgttccttcgccaactgtttcagaatgtcgccggatatgacctggacgatcggatcagttggatcgtggatgattcggccgaaatatttcgagccgcagatatgcgtcaggtaatggccggattcggacaccgcacccagcaaaccgatccgatgatacatttctacgaggatttccttgcagcgtacgacccgaaacaacgcaaaaaccggggcgtatggtacacaccgcaggccgtggtgagttgcatcgtaaagaccgtggacgaaattctgcaagccgaattcaacctgccgatgggtttggccgacacatcgaaaataaccgtcgaacgcagcatcgaccaaagcaaagacaaacggttctccgacggcaaaaagaaagagaccgtcaaaatccacaaggtacagctcctcgatccggcaaccggaacaggcacgttcctcgcggaagccgtcagccgaatccatgacaagttcaacggacaggccggaatgtggcaaggctatgtcggggaacatctgctgccgcgtctgaacggattcgaacttctgatgacctcctatacaatggcccatctgaaactcgactggattctcacagagacaggttacaaggccgacgataacgaacgcctgcgggtgtttctcaccaattcgctggaagaacaccacaaggatacaggcacactgttcgcccagttcctcgcccgcgaggccaacggcgcaaacgaaatcaagcgcaatactccggtcatggtcgtgctgggcaatccgccgtacagcggagaaagcaaaaacaaaggcgaatggattatgcgcctgatggaggattacaagaaagaacccgatacgaaccagcctctgaaggaacggaatccgaaatggatcaacgatgactattgcaaattcatacgcttgggacagttcttcgtggatcgcaacaacgaagggatactggcttatgtcaataaccatagttttatcgacaacccctctttcagagggatgcggtggaatctgctgcggagtttcgacaaaatctacatcatcgatctgcacggcaacagcaagaaaaaagaggttgcacccgacggcggcaaagacgaaaacgtattcgacatacaacagggcgtctcaatcaatatcttcgtaaaaacgggacgcaaggcaaagaatgcccttgccgaagtatatcatcacgacctatacggccgaagagagacgaaatacgattacttgtcgtcgcatacggtggcgaacatcccgttcgtgaaacttcagccgtccgcaccggaatatttcttcgtgccgaaaaattacggagcaaaggctgcgtacgacaggggcttctccgttacagagctgttccccgtcaattccgtgggcatcgtgacaacacgggacgaactgctgataaaagacagtccggaagaagtagaaacgctcatccgcgatttcataacaatggaagatgccgaactcagaacaaggtacaacataggcaaggactcacgggattggtctgttgcaagagcaaaagcggatataggaaatgccgtcgatacggctaaaatcacacccatcgagtaccggccgttcgatcgcaagtatctgtattacactggcaaaacgactggaatcgtggcctggccacgattccaggttatgcggcattttgccgccgaaaaaaattttggtttggcggcatgccgccaaaccaaaaaagaaaattggacacacatattcctcacaaaaaatataatccccgctattttcgtagaagtaaaagataattgcaatacctttcctctctacacctatcccgatcagaccgacctgctgaacaccggacgcaccccgaacctcgacccgaagatcgttgcaaaaatagccgaaagcatcggattggagttcgagccggagaaaagcggagaaccggataaattcgccccgatcgacctgctcgattatatctatgccgtgctgcactgtccggcgtatcgggaaaaatacagggagtttctgaaggccgactttccgcgtgtaccatatcctgaaaataccggacagttccaccgccttacgcaaacaggtgccgaattgcgtcggctgcatctgatggaaaattccgactgctgggaattgtcggtcacctatccggaatgcggaacggacgaaatcacggaagtccgctatgaaaatgaaaaagtattcatcaatgatcggcaatatttcggcaatgtaagtcccgttgcctggaatctcttcataggcggctatcaacctgcccggaaatggctgaaagaccgcatagggaagaaactcacattctcggacattcgccactatcaaaaaatcatctttgcactctgccgcacagatgccctgatgcgtacggaactgaatatcgaaaaattctaaatccttatcaatatgaacaacttcactttccaaaatccggtcaagttgatcttcggcaaaggctccatcgccaagctggcgaaagagattccggccgacaagaagatcatggttactttcggcggcggctccgtcaagaaaaacggcgtgtacgaccaggtggtcgcagcgctcaaaggccgcaacttcgtagagttctggggcatcgagcctaatcccaaaatcgaaaccctgcgcaaagccatcgctcagggcaaagccgaaaaggtcgattttctgctttcggtgggcggcggctcggtactcgacggtaccaagctcatcgctgcgggcattccctacgacggcgatgcctgggagctggtgctcgatgaagacaaaatcggcgaagtcgttccgttcggcgacgtgatgaccctgccggccaccggctccgaaatgaacgccggggcggtgatctccaacctcgccacgcaggagaagttcgcgttccaccactcgttcccgcaattctcgatcctcgatcccgaaaccaccttctcgctgccgccgttccaggtagcctgcggtatcgcagacactttcgtacacgtcatggagcaatacctgaccgtcacgggcgtttcgccgctgatggaccgctgggcggaaggtattctgcaaacgctgatcgaaatcgcccccaaaatccgagcgaatcagcacgattacgaccagatggccaacttcatgctctgcgcgacgatgggactgaacggcttcattgcgatgggtgtaccgcaggactgggcgacccacatgatcggacacgaactcacggccctgcacggcgttacgcacggacagaccctcgtggtcgtactcccggccctgatgagcgtaatgcgagaacagaagaagggaaaaatcctgcaatacggcgagcgggtgttcggtatccgtgaaggctcggaggacgagcgcatcgaccggacgatccgcgccaccgaagagttcttccgctcgctgggactggctactcgcctgcacgaattgcagatcgggcaagatacgatcgacgagatcgtccgtcgcttcaacgagcgcggctcccggctgggcgaagcgggcaacatcacgggcgacgtgacccgccgtatcctcgaactctgcaaataagggtaggaaccgaaacaggcgaagcgggttttcaaacccgcttcgcttgtttacttcgtaatcatccccaatccatgccatctgcaccgaattatgctcacacctgattcacgaacagcacaaaagtatttccggaaaaatccggactgcaaacacccgaaaactgcgagcaacgacaactccgagccaaatgtcgaagagcaaggcctataaatcgagtacagatcccttctatttttccggataaattcccttgaacgtataataacgggccgccaggtagctgtaaagagctacggcgagcgatgtgatacacttggaaggggtcggccacagaccgcacacctcgaccaaaaatttcatacaggcgtaattgagcaaaatagatcctacgactgtcaatagatagcgccccaactgtttgcccgccgcaacaggcagcgtgcggaaggcgacatagcggttcagccagaaaccggtgaagaacgtaatgggaaaaaccagcaccaaagaggcgatatgcggcgacataaccacgaatcccaggtcgaaataacggcccgcaaccagaaaatgatagatcagggcatagctgaccgcatccacggacagcgtgatcgcaccgcaggccccgtaacggaaaaccgtttcggatatcacacgagaaaaagggcgtcgataaaaccagtcgatcgcacgccgcaggatcagtgcaaaagtcatcgttttttcgtatagggccacacttccttcagaccggcccccgcatttctcataaagtcacggcactccgcagcagaatcgctttcgaaaacggaaaccatccactttttcccgaaaaagtaaatccggaagttcgtgtccgacaggcggtcccggacttcggcaacggctcgccgggcattctcttcggtactgtaaacgccccagaccacatacgtcctgccgggaatcatccaggcgacctcgggaaccggcgcttcgtgatcggcgtcaagatcggcgttgtccgcacccgtcgcgccctcggaaggggttccgacgccaaccgtctcatcatccggcaacgtttcgacaggacggctctcagcaaccggctcggagcctatcgcaccggattcggcatcacctccggcggcttcgggagtttcgctcccggttcttaccgagacggatgaaacaacctcggcaacgggaaggacctcctgcttttcagaatcacccatgaacggcaaccgcatccactctccgtactgccagatgccgtaaccgacagccgccgtacaaagcaagacgatccccagataaaggggcagccgggaatatcggcgtttcagcggcagcggatcgtgtccgagaggattgagaacggcatcgagctgcggatcgagccggaaatagcggtgattgagctccccgacccccggaatggagattccgtcctccacccgggctttgtcgagccaccgggaatagatatcttcggccgcagcaacatcgcaagcccccgcccgggcaatcaggtctatcacggaaacgccccgctgctcggagaggagaaaggcgatacgccgggacggacgttccaactgccgggccgaagcacgccaggcactccgaaattcgggaacgagcgagccgactccgggaaaccagatttcccatccgtcggccaacgcattgaaaacaatcttatttacctcgtcctgcatcatttcatacgacgatgtttacgaggtttggaactgccgccctgctgccggacagtctgctgtcgaaccacccgcaccgtatcgggatctaccggagagcggtgcatgccccggtaaatcatataaatccccagcagaatgaacggaatactcaacaactgtcccatattcaacagcataccctgctcgaaagcctcctgatccaacttgatgaactcgatgaaaaaacgagtcaggaaaatcccgatcagccccacgccgaacatcacgcccggacgacgccgtcccaggtcgcgcccgtaatagagccagcaaaggattccgaaaatcaccaggtagcagaacgcttcgtaaagctgggtcggatgttgcacggggatggagtcgataggaacattcggataaagccggacgaacttgaacccccaggaaacatcggtcaccgcccccacgatctccgaattgaacagattacccagacggacgatggcgccgccgatagcgaccggtaccataatccgatcgagcgaccagatataaggaagtttattcttgcgcgaaaaaagccaaagaccgatcagcaggccgacggcagcgccgtgactggccatgccgccgttgcggaaatccgtaatgatagcccagggatgggcaagaaaataccccggttcataaaaaaaacagtgtcccagacgggcaccgaggatcgtggccaatgtgccatagacgaaaatcgactccgaaaccttctggggcagcccttcgcgtttacagacctggtcgaagaaaagcatgccgccgagaatcgccagcacccacatcagtccgtaataacggatatcgaacgatccgatcgaaaaaaagacgggattgaaatcccagacaacggttattggaaggatcatacgttatgcaaaattagtgggaatgtcctgtttgagcctttttgagcgtaaacgagaaggtcgttcctactcccaactcgctgcggacgttgattcgctcgccgtgagcttcgataatatgcttgacgatcgccagtccgagccccgtaccgccctgctcgcgtgaacggcccttgtccgtacggtaaaaccgctcgaaaatacggggcacgtcctccttggcgataccgacgccgttgtcctcgacttcgacgaggatcttatccagcatatctcggaatttgattcgcgttacacccccctccttgccgtaacggatcgagttgataatcagattgaccaacacctgtccgacgaaatgcttgtcggcacagacccagaaaggcgaaggcaggctgtcggccccccttacctgaatcttaattcccttcttatcggcttcgatttcggcctgttcagcaatctcgcgcgtcatggcagcaatgtcgaaagactccattttcaggcgcgtcatattgctctcgagcttggaaatggtatccaaatcattgacgatgtcgatcaaacggtcgatgctcttctcggcccgttcgaggtatttacggttgatcaggtcgtcctccagaccaccgtcgagcaatgtcgaaatatacccctgaatattgaaaatcggggttttcaactcatgggccacattacccagatactgcttgcggaacgattccgtttccttgagccgcgcgatctccttgtcgttggtatccgcccaggcggtcagctcctcggaaatgttttcgacgtgcttgtccttgagctcatccagaatctcctgcgtatgcacgttacgcgaaagtacgatcgagtagatcggcttcagcttataagccacgtacttgcgaataataaacaacgtcagtaacgtcataccgacaaacacggcgcaagccacgcagagggtctgccaccacaccgcttcgagcagccacatggccgccgcgacgacgatcgcagccaccgccgcaaccagcagcgaagcgaactccttggttttgataggcatcatttcaggtaatttttcatgagccgggcaatgtacttgccgataatgtcgaactccagattgaccaacgtaccgggtttgatccggttgaagttggtgtgttcataggtgtagggaatgatcgccacctggaactgtccctcctgcgaattgcagaccgtcaggctgacaccgttgaccgtaatcgaccctttctccaccgtacaattatcccccgcaggttcgtatttgaacgtaaaataccagctgccttcggcatcatcgacggccgtacaaacggccgtctgatccacatggccctggacgatatggccgtcgagcagcgcatcgggccgcatcgaacgctccacattgacgatatcgccgacctgcaactggcccagattgctgcgcagcagcgtctctttcattgccgttacggagtaggtatcctccgtaatatccaccacggtcaggcatacgccgttgtgggcaatgctctgatcgatcttcaactccccgcaaaaatccgcacgaaaagtgaaggtcttattttgttgttcgatacgaatatcggtgagcgtcaccgttctttccacgattcctgaaaacataattcgcttttagattttaatttccaacttgcccacgacctgatatacctgctcgatatcggaagccttgacgaaaatatcgtcgaaattttcccggtccgcagcaaccaaccgccattcggaatcccgctccgaagtgcgaactattcgcaaagttatgattttttgacagacaatcacgtattcgagtccgggaataatctcctcgggcgtcatttttttcaggaacacgatcgatccggacggaatagaacaccccatagcctttccattatacagcatagccaggtcgcagccggtcagttggggaatcaccatctcccgatcgggggccaactcgtcaagacgggtgatatgggattcgacatccacctgataaaacggaatttgcaccccgcataatttctcgtccacaaacatctgcccctcgccggtaagcagccacgccaggctgacttccgggaatttggtcacgatcttgtcggccaggttccgggaaataccattatttcccttttttatctgatagaggttttcaccccgcggcaatccaatatagagtgcaaagtagttgatagtcatattcgcccagcgaataacgctgtcgattctttgccaattatccattttttgtcgcataattcaattttttttatacctttgtgccaccggtcccgtagttcaatggatagaatttaagattccggttcttacgatatgggttcgaatcccgtcgggatcacttccaaggcgccttcttcaaggcgccttttttattgcatacccccattacgacatactaatataataattttggacaaatataatgataaattacggttatataataatctaattcatctaaaatcgttcctacctatattattagaaaagcattatcggcccgcgaccggtaattctatctgctcgacacacccttgcaattatcggaattgatccatccttaaaaagaacaggctacggttcggcatagtccaaacgacgctcgcagcgaaaacaatgtacttttacgtaccatgctccgcagggagggaaaaagggactcaaacaaattcggtcctctcctcgcatcatctttgcagaagacaggacgctcccggaaatttttgaaagcaaacattcataattacgtccgccttttcgtatctttgactttctctttagatacttcgcctcggcaaaacgcaaataaatttgcttttgcacgcggcttattcgtatctttgcagaggataggaggcggttcggcaatctttgcgtgcaagcccgcacgattgcctatacacctttcattatagcagcggtaatggggaacaaattctacccgctgcattatctttgcccgaaacaaaatggactatgagcaccgaaaaaaacatccggaacatcgaaagcgacctggagttcgaaaatcagatccgcccccgcgaactggacaacttcgccgggcaggagaagatcgtggataacctccggattttcatccaggcggctctgatgcgaggcgattcgctcgaccatgtgctgctgcacggtcctccgggactgggtaaaaccacgttggcgaacatcatcgccaatgaaatgcatgcacagttgaaagtcacatccgggccggtgctcgacaaaccgggcgacctggcgggactcctgaccaacctcaaccccggcgacgtacttttcatcgacgaaatacaccgtttaagtcccctcgtcgaggagtacctttactccgcgatggaagactacaagatcgacatcgtactggacaagggtccttccgcacgttcgatacagatcgaactggctccctttactttgatcggcgcgacgacgcgcagcggcctgctgacatcgccgctgcgggcccggttcggcatccaatgccacctggaatactacgattcttcggttctgaaaggcatcataaaccgctcggcccgcattctcgacgtttcgatcgacagcgatgcggcgttggaaatagccctccgttcacgcggaacgccgcgcatcgccaatgccctgctgcgccgtgtgcgcgacttcgccatggtcaaaggcgaaggtcatatcgacctcgacatcacgcggatcgccctgacagccctgaatatcgactcccggggactcgaccagatggataacaaaatactcttgacgattattgaaaaattcggcggcggccccgtcggactgaacaccatcgctacggcagtcagcgaagatgccgggactatcgaagaggtttacgagccgttcctgatcaaagaagggttcctcaaacgaacgccacgcggccgggaagcgaccgaaacggcctatgcacatctcggattctcccggacggaccatggcgaacagtccctgttctgacataaaaacggaaatccggtcgataaattatccaccgtcccaagggctgtttatgataactttcttatgaaggctcgccggaaaccgaaacacccgctataactaccaacagatatcctcacagtatataatagtatatgattgatattgacgatttcaaacaagaggtcgagtgtatttataaagatgaaaaatactctgtccgagataatggtgctgtttttcggcattctcgtgatggtaaacatcctcgtaaatatgataatttttggactttcgggaaagccaatgataaacacggatacatggagattgcctctgttcgtgttcatattatcgtggctacggcctttcatggcccgaaaccgacgaaagaacatgtcgtcgatcatatagatacgaatcgccgcaacaatcgcccgaacaatcttcgatgggttacacgattggagaatgcactcgaaaatccgattacccgaaaacgtatcattatgcggtgcggcagtattgaagcgtttttggccaatccgtctttattgcaagaaagcgatgttactcccgatttcagttggatgagaactgtaacagatgccgaagcccaagtcagtaaagaacgattattggcatgggctgaaagcgaccaacaaacatccggcggcgctttgggcgaatggatatatgatcggcaaccaatttcgcgaaatgacggtcagttgtcgagtgtagatgaaatagataaactgcaattcgattccttaaacggttggggtcaaattccgcctcttggacaggaacatcacgttgagacagaacagaggaagcaaaatgttatgctctcgttaacacccggagcggcccaagaaatctatttttataatgataagcccaatgaatacccatgtaccccgcaggaatacaatggcgatcctttgatagcttatgccgccaatctgaccgaaaatgctgtctattggcggaacaataatggggatcgtgagtatgtagttgccaagtatggattttcggaagatcgaaattctttatatgtaatgactaaatccgcatacgtgtggcgaagccaagatgatggagattctatgcctattcccatagcaaatctcaataaagacgagtttagtgaaagtgaattggactatcaacttggagagattgtgtacgaagataatttattcgtacataaaagggtaaccggctttatgcctaaagagtatttgggggagttatttgacgaatatattggtaagaagaaaaagattaacaaggattaaaatattccggatgctcgattttatccgtaattttgttgcccgacacaaggaaaaattgtttttacttactaatattcagataaatacgcacacaaataaataacatttttcggcaaaaatatatgaacgtacaaatcaatatcgacaccgccagctgtatccgatgcggaaaatgcgtcaaggtttgccctgcctggatcatgactcaggccaaacccggcgacccgatcggtctacgcaatatcgactcctgcatcgtctgcgggcattgcgcggccgtttgcccgaccggctcggtccgccacagttcattccctcccaataaaatccatccgatcgaccgcaacgggctgccctcgcccgaacaggtattgctcctctgcaagacacgccgttcgaaccgggcgctctccgaccgtcccgtcccgcaggaagcgatcgaccgaatcctcgaagccgcccaccgggctccgacggccagcaaccgccaggaagtgagtttcacggtcatcaccgatcccgcgatcctggacaagatcatccgtttcacgctggatactttcgtgggaatcgcccgcaaattggaaaacccgctcgtcaaacccatactcaaacgtctgcggcctgaattttataactacctgcctgctttcaaacggctgattgccgaatacgacaaaggcaacgacctcatcctgcgcgaagccaaaaccctgcttctcattcacactccatacgcgaaccgtttcggagcctcagatgccaaccttgcctaccagaacggttcgctgatggccgaaagcctcggcgtcagccagatctacacgggcttcgtcctttcggcactggcacaggacaaaaaatgcaaatttttgaaatccataggcatacagggaaaagtacatgcaggtatggcgctcggaatgccgctgttcctctatcccaattacatcgacaaaaaaccgatcgcagtaaacaggctctgaccccggcggatcttttccggtttttctcaccggaataccggctcgggcgcgatccttgcgaaaaaataagttcatcaaacccataaaacacaatgcaaaataaaaatatgagagaagaagctcttcgttaccatgcagaagggcaatccggcaaaatagcggtaatacccaccaaacccctcgcttcgcagcacgacttttcgctggcctactcgcccggcgtggcggagccgtgcctcgaaatcgtgaaaaatccgctcgacgcctataaatatacgggcaaaggcaatctggtcgccgtcatcaccaacggcacggcagtcctgggactaggcaacatcggggctttggccggcaagccggtcatggagggtaaaagcatgcttttcaaggtattcgcagacatcgatgccttcgatatcgaagtggatgcgaccgacacggaccgtttcgtggaaaccgtcaaggccatcgctccgaccttcggcggtatcaacctcgaggacatcaaggctcccgaatgtttcgaaatcgaagcccggcttcgtgaagcgctcgacattcccgtcatgcacgacgaccagcacggcacggccatcatctcgggtgcggccctgctgaacggcctcgaaatcgcgggcaagtccatcgccgacgcccgtgtggtcatcaacggcgcaggcgctgcggcggtttctatcgcccgccttttcctgaagctcggcctgaattgcgaaaatctcgttctctgcgacagcaaaggcgtggtttcgacccgccgcgaagacctgaatcctgtcaaggaacaactcgccacggaccgggaagacgtcgatacgctggccgacgccctccaaggtgccgacgtcttcctcggcgtttcagccccaggtatcctgacgcccgaaatggtccgcacgatggcccacgacccgctggtgctggccctggccaaccccacgccggagatcacctacgaagaggcgatggcatcccgtccggacatcatcttcgcaacgggccgttcggactatcccaatcaggtaaacaacgtgctcgctttcccgtaccttttccggggtgcgctcgatgtatatgccagtacgatcaatgacgaaatgaagctggccgtcacccacgcactggcacgcctggccaaggaaccggtgccgcaggaggtcctgaaaacatacggtctgaagtcgctctcgttcggacgcgaatacctgattccgaaaccgagcgacccgcgtctgctcgcggtcgtcgccacggccgtggcgcgtgcagccatcgaatcgggcgtagcacggcgcgagatcgaggattgggatgcctacgccgcatcgctcacccgacgtgtaaaaaacacaaagtaaacccgaatccctgccatcaggaccggcatcaaaaaagcgccccgagatttattcggggcgctttttcgatggcagcatattccgacgaacaatacgaaaaaggaggtcatgaggaggtatgcggagcgacaatttatcgagaaacgataaggatgcaaaaaattatatccaaaccgtcattttatttcataaatatttggatatatatatttgagccataaccgacgtcgtttatgtcaaactttcttaaattacacccagaaccatgaaaagattagctctgttattgctcgcatttacaggcctgatgtctgcctgttcaaaagacgatcccgttccgcaggatggaccgcttacccccgacagcccggaagggcgcgaagccgtaacgatccccgacgaatttctctgctcttacctgctcaagtatttcgatttagaccgtaacggagaactctcccgctacgaagcatcgttagtggtacgaatcgactgccccggaaatatagtatttggaggaaaagactatatgtgcgatgcgaccggtatagaagcctgcacgaacctacactacctgaatttgtcgggaaacgatctgaccaaactcgatgtaagcaacaacaaactgctcgatacgctcgattgctcgatgaattataacctgaaaagtctggacatatcgcaaaacaagaatctcttgcaactacattgttatgcctgttctcttgaaattgagagatgggacttatctgcgaatccggaattgaaagatttgagaatcggaggagacggattttattctttttccacaatatccgttctcgattgcagcaacaaccataagttggaaagcctaatggcaggccaaagtcaaatgtcagaactctatctcgattgtccggaattgaacttagttgatttagaactcaacaatctttcttcgctcgattttagtaactgtacaaagctcacaacacttaatatcgctcaaaataagatcacccacttggatttacagtgcccggacttggatcttttgcgttgtgaaagcaataatctcaccgccctcgacgtaagcaactgtccgaagttgaatgtgctttattgcaacgacaaccaactgcaggagttggatttgacgaataacaaggagatcgaatatttacacgtatcgaataataaaatccaaaatttagatttaactaatctcactatattacatgagttagattgctctaacatcgaaataacaaatttgcatctaaacagtccagaattaacacaattaatatgcacaaactgcaatcttcaaaaattggaatttttgaacgtccctaatttatctgcaatagaatgtcagaataacaatctccaaagtttggatttgtcgaatcttcccgccctgtatcttctcaagtgttatgagaaccagctcgaaacgatagacgtaagtaacaatccggaacttcggggctttttctgcaaccccatggaatcgctcaaaaccatttatctgaacgaaggacaggaccagcttttgcgagctttcgaaaagcccgaagcggcggaagtcgtgtataaataaatcgcaacgtcagacacaacaaacccgaacgcagatgcgttcgggttcgctgtgtctgacacgctcccgaccggctgtcgctcggaccgaaaggcgggaaaccgcatttcgagttccggaacgaacgtacgaaacagacctgccacgcctcccgcatcgaaacaggatggaatcgatatgcccgcccctgcaaacagaagcgaccgggagacataatccgcagcatgacaccccgatacatccactccttttgcagaaaatcgagaggaattctataaaaaacgaacacggccatcacactctgttctcattttcattacctttgtaacctaaaattccctttatgcaaaaacttcgcaatatagccattatcgcccacgtcgatcacggcaaaaccacactggtcgataagatgatcatgcagagccacgtgctgcgcgacaatgccaaaaattccggagaactcatcctcgacaacaacgatctggaacgcgaacgcggcatcacgatcctctcgaagaatgtatccgtcatctacaaagactgtaaaatcaacattatagacaccccgggccacgccgacttcggcggcgaggtggagcgtgtgctcaacatgtgcgacggcgtgctgctgctcgtcgatgctttcgaaggaacgatgccccagacccgtttcgtcctccagaaagccctctcgctcggcaagaaacccatcgtggtaatcaataaggtcgataagcccaactgccgtcccgaagtggtcaacgaacaggttttcgacctgatgttttcgctcggagcaacggacgagcagctcgactacaaaaccatctacggctcggccaaacagggctggatgtcccatgtctggaatcagccgacggactcgatctctccgctgctggacaccatcctcgacgaaattccggaacccgccgtcgtggagggcacgccccaaatgcttatcacctcgctcgaatactcctcctacatcggccgtatcgccgtgggtaaagtgacgcgcggagagctgaagaccggacagaacgtcaccctggccaaacgcgacggagtgacgatgcaaaagagccgcatcaaggagttgatggttttcgaaggtttgggcaagaaaaaggtcgatgcagtgccctgcggtgaaatctgcgccctgatcggcatcgacggattcgaaatcggcgatacgatctgcgactacgagaatccggaaccgctgcccccgatcgccatcgacgaacctacgatgtcgatgcttttcacgatcaacaattcgccgttcttcggcaaggacggcaaatacgtcacctcccgccatatcaaggagcgcctcgaccgcgagttggagaaaaacctcgccctgcgcgtcgaaccgggagccaacgccgacagcttcatcgtcttcgggcggggcgtgctgcacctctcggtgctgatcgaaaccatgcgccgcgaaggttacgaactccaggtaggacagcccaaggtcatcgtcaaggagatcgacggcaagaagtgcgaaccgatcgaagagatgaccgtcgattgtccccaggagtactcggggacagtgatcgaactggccaccaaacgcaagggaaccctgaccaacatggaaaccaacggcgaccgcacgcggctcgaattcacgattccctcgcgcggtatcatcggtctgagatccaatatgctcacggcaacggccggcgaagcgatcatgacacatcgcctgaaaggattcgaaccctggacgggcgaaatcgaaatgcgtgtcaacggctcgatcatctcgggcgaaacgggtacggcctatgcctactcgatcgacaagttgcaggaccgcggacgtttcttcatctctccgatggaacaggtgtacgaaggccaggtgatcggcgaacacacccgccagaacgacatcacggtaaacgtcaccaaagccaagcagcttacgaacatgcgagcctcgggatcggacgaaaaaacctcgatcgccccgcccaaggtattctcgctcgaagaggccctcgaatacatcaaggaggacgaatacgtggaagtcactccgcacgccatgcgcctgcgcaagatcctgctgaacgaaacagaccgcaaacgcgcatcgaaatagtccatggatcacttcacgctggctcttacgacgggtgccgtggcaggcgctctggacatcatcccgatgatcgcccaaaaactctcgttccgctcctgcctgtcggccttcctgcaatatttctttgccggggcgatcgtcttttacagcaacctgccttacctgccctggtgggcggacggtatggccgtgactctcatgatggctctgccggtcgtgctgatcctcacgggcaaagaccgtaaggcggctccggtcatcctgctcaatgccctgctgctgggattcctcatcagcgttgcagaacgatatctggcataaaatgaagaatttcaagggtatcgtctatgcggcattgtcgtcctcgaccttcggactggccccgctgttctcgattctcctgctctcggacgggttctcatcgttcgaagtgctctcctaccgttggggagtagcttccctgacattgggaatcgtcggactcgccggcggctgccggttccgcatctcccggcaggagttatgcacggtattcttcttgagcctgtttcgggccgcgacatcattgagtctggtgatcgcctatcaaaatatctcgagcggggtcgcctcgatcatccatttcatgtacccgctggccgtcgccctggccatggcactctttttccgcgaacgtatttcgtggcgaacggcagcggccatcggcgtttcgctggccggtgtcgccctcctctccgccggaggaatcggcagccggggcggagataccacgtcggggaccgttgcggccgccgtttcggtattcgcctatgccgggcaagagccgcgcggcgcaggtcgaatcgaccaccctgaccttttacgtcatggccttcggagctctgctgtttctctgcggagggatgttcacgggcggtgtccggctcgtgaccgacggaaaagagtggctcgctattctcggactggcgctcccggccacggcgatctccaacatcacgctggtcagggcgatcaaattcatcgggccgacgctcacgtcgattttcggggcgctggaaccactgacggcagtagccatcggcgcaacggttttcggagagcggttcggctggacaagcgccctgggcgtgggactggtcgttgcggccgtcagcatcgtcgtactcgacacgcaacgcaaaacgggaaagactactccttcttcttcaacgtagcgaacgaaaggatgtgccaactggttccgactgcgagcagaaacagcccgagctgcgcccaccaccacgcatcgacgacccgaaagatgcaataccccatcgtcagccagatcaacgacacggaaacaatcttcgcctgcaaaggtatggcgcgattttcgcggaagttacggatataagagcccaaatgcctctggttcaaaagccacgcatagaggcggggcgaagaacgaacgtaaagggcggcggcgaggagcaggaagggcgtcgtcggcaacaacggcacgaagataccgacgatacccagccccaggaagaggctcccgaatatgacacccaaaattttcacggtgtgaaaataatgatttttaccggaacattccggccaaagaaggttttttcgtacatttgtagaatgtaggaagacgctgtaccctcataccgcccgaaggcgcggtccggaggcttccaatttccgaaaaaaacgacgacggcagcatattgccatagaaaggaatcaactaaaaacaaatacgttatggaaaagaaaatcggtatcgccagcgaccacgcgggctatgaaatgaaagaatttctggtaggttatctggctgcgaagggttgggatgtcctcgacttcggccccgaatccgaggagagcgtcgattaccccgatttcgcacacccgctggccaatgccatcgaaagcggggagctggagcgcggcataggactctgcggctcgggcgaaggcatggccattaccctcaacaagcaccagggcatccgtgcgggactcgtatgggacaagcagatcgcccacctgatccgccagcacaacaacgcgaacgtgatcgtgctgcccgcccgtttcatcaccaacgaccaggcagtggaattcgtcgaagagttcctcgccaccgatttcgaaggcggccgtcaccagcgacgcatcgagaagattcccgtcaaggcgtgcagccgtcaataaacctgtagcggaacggcaacgttttatttattgtaagggaaagacaaaaggcgtgaggcttcggctccgcgccttttcttcatcgtcgaaaagcccgaaaacggccgatccggaacccgacatggcggcataaacggctccggcatccaaaagcgaggctttggctgcggcaatctccggatgggcggcaaaaatatggggttcgaaatcgtttttcagacatgtctgccattcggtcacgggccgggcgattcgctccgcaagcgggacggcaggaacgccaggtcgaatcccggcgtaagcctcgcgcgtggaaacaccgcaatccggctttaccacagcgatccataacccccgcagatcgagttccacgggactcatcacctcgccgcgtcccgtacaaaattggggcgtattgcgcacgaaaaaggccgtatcgcttcccaatgctgtggcacaatcgatcagctcccgctccggaagttccaaaccgaataattcatcgagcgccaagattacggcggtcgcgtcggacgatccgccccccagcccggcaccgaaaggtatccgcttgtcgagcgccaccgaaacatcgcccgcaccgtaacgtgcctgcatcagccgtacggccttcatacagagattatcggcatccgaacaatcgactgtaaggccgctcgaccggaaggaagtttgcgctgcatgttccacttcgacgacatcgtacagtccatacacaggaatcattacggtcgccaattcatgatacccgtcctcacgacggcacagcacgtccagcccgatgttgatcttacaatttgccttgcgaatcatatgacaaagatagtgaaagccgggagaaaacgggaacttgttcgcagttttctctcggcgcatcccatctaaaactatgtcaaagacagggaaaggcgagagcgatcgaaaatttattttctgtttcccgcccgaaaaaactccttgtcgggaatttccgttttacgccgtttccgtctatctttacggcatgaaattccgcactgaaatccgaattgcgccgctatccgtccggatcggctatgaaaaccgcctgctggcgttgggatcctgtttcgccgaacacatctcaggccggctgtccggagcccggtttcggatcacgagcaatccctccggcatcctgttcaaccccctttcgctcgctgcaaccctcgaatcctacgccgcgcagcaagaggtcgtccccgaagaactcggctgccgcaacgggctctggttccactacggttttcacggagctttctcggacggctcgcagaaaatggctctctcgaaaatgaatctggcccgcagggcaggagccagcgccctgcgcgaagccgaccgcgtgattcttaccttcgggacggcgtgggtttacgagctccgttcgaccggagagatcgtggccaactgccacaggcaacccgcagcactctttcggcgccggcgtctgaccgtcgaagagatcgtcgcccgctacgacgatctgcaggcaggcccgctcgccggaaagcaagtgatcctcacggtcagtcccgtccggcacctcggggacggtcttccggacaactttctgagtaaagcgaccctccgcctggccatcgacgaaatctaccgccgacatgcagactcggcctacttccccgcctacgaaatcctcacggacgacctgcgcgactaccgtttttatgccgacgatctggtacacccctcgcaacaggcacagcaatacatctgggaactcttcaccgcagcgaccctcaccgaggaggccctcagaaaactcccgcaagtagaagccgtgacgaccgccgccggccaccggccgctacaccccgaaagcgacgaataccgtcgattctgccgcaaacaactggaaatcatcgaatcgcttccagaaatagacctcagccgggaaaaagaatttttcaaccagtttctataaaaacgatatgaagtacaaaatcgacacgacgacctggaaaagacgcgaacattatgaatttttcaacggaatggacgatcccttctggggaacggtcgttccggtcgattttacggagtgctacctcgaagccaagaagaggcgtacttcgttcttcctctgttccctgcaccgtattctaacggccgtaaaccggatcgaggcattccgataccggatcgaaaacggggaagtggtctgttacgaccgaatccacgcgagcccgactatcggacgcgaggacggcagcttcggctacgggttcttcgagtacttttccgacctgcacgaattcatccgggcggccgagcgggaaacggaacgcgtaaaggcagcggacggtctttgtctgggagcgggagccgggcgcacggatctgatctatttttcggctgttccctggttcgcctttacggaaatgaaacatgcccggtcggccaatcggggcgactccataccccgcatctccaccgggaaactgactcggtccggcgatcggcttacgatgcccgtatcgctcgacgtacaccacggattcatcgacggacggcaggccggcgaatttttcgcactgctggaaaaccgagaatgaaatccggctccggcatccgatttctttttttgaaggacggcacaaaacaaatgaagaaaatactaaataaattcataaatttgccgttcgatagtcacacgcgaaaaaatgaagaaaatcctgctcgtcctgctcctgctgccgggtgttctgccgatcctcgcaaacactccgccccgtctggtcatcaatttagtcgtaagctccatgcgtccggacgacatcgaccgttaccggagccagttcggcacgggcggatttctgcgtctgacagagggcggcgcccgcttcacggaaggctcctacgactatcagcaaacttcgacccccgtatcgctggccacgctcaccacgggagcgatgccctcgacgcatggcgtgatttcgacccgttggcgggactacatcgtcaataaaacggtcggactcatcgacgaccccagcgtccgcgatcccgaatactaccacggcaacggcgcctactcgccccgcaacctgatcgccccgaccgtcggggaggccctgctccggcaatctcccgacagtcggtcggtaaccgtagctctcgacccgatttcggccgtggtgatgggcggacgcgaaggcatgaccttctggatggacagcgtttcctgcaactggaccacctccacctactacctgcccgttttaccggcctgggtcaaaagattcaatgcggacaaactctacctttcttacatcggcgaaccgtggcactccctgctgaacgacgacaaataccgcaacaaacgctgttcggacatcgtcttgatgagttccatggccaagaaaaagcgttcggccgacacctcggccgacgccgtcaaacggatctcgtcgaaagccccttccgaaagccgctacgacaacatcctgtattcgccggcaggcaactgcctgacgcttcaattcgccaaaacggccctgacacaactcgacctcggcaaacgggaccggaccgacctgctgaacatctgcctcgacgccccgcgtgcgatccgcgaggcctacggccccgaatcgatcgaagccgaagacatgtactaccggctcgatcaggatctggaagagttcctgacatacgtttatacgctgttcaagcctcatgaagtactcgtcatactcacgtcggatcacggcagcagcccctcctacgatttcggccgcgaagcgtgcgacaggttcaatacgcgccagttcgaagtgatcgtaaacggatttctcagcgcccgctacggaccgggcaactgggtgttggagtacgaagacaaatgcctgtacctgaatcacaacctcgtgtatgagaaagacctcagcctggcagatattcagaacgaagtggccacgttcgccatgcagttccggggcgtttcgcacgctctctcggctacggccatgcggaccagctacttcggcagcggctatgcccgcaagatgcagaacagcttctatccccgccgctcgggcgacgtcatcatcaacctgatgccgggatggatcgaagagcacgaccacaaacgctcctcgtcgggttcgatgtacggctacgacacccgcgttcccctgatcttctacggcgcaggcatccttccccggcagatagaccgccccgtcgatatgacggcggtcgccccgacgctctgccgtctgctcggtatcgaggctccggcggcttcggagggaacggtactcgaagaagttatttcaagcaatatttaaccatggcaaacgacaaacgacaagacgagatcatcgaagaattttcggtattcgatgaatggctcgacaaatacgaatacctgatcggattgagcgacacgctcccggccatcgcacccgagcaccgcacggatcagtacctgatccagggctgccagtcgcgggtttggatcgacgcccgttacgaagacggcaaagtctggttcacggccgacagcgacgcgatcatcaccaaaggaatcatcgcactgcttatccgggtgctgggcggtcggacgccgcaggagatactcgacacggacctctatttcatcgacgccatcggcctgagcgccaacctctcccctacgcggagcaacggtttgctggccatgatcaagcagatgcggctctatgcgctcgctttttcaaaaaaataactcttacgcaacatgacaccagaagagattttacaggtagaaaaagatatcgtcgccacgctcaagaatatctacgaccccgaaatcccggtcaatatctacgacctggggctgatctacgaaatagactacgaaccggacggtgtggcgaatatccgcatgaccctcaccgcccccaactgtccgatggcggacatgctggtcgaagacgtcaatcaacaggtcgccaaagtcaagggcgtgaagagcgtcaatgtcatcctcacgttcgatcccgtatgggacaagagcatgatgtccgaagaggcgctgctcgaactcaacatgttgtaaccggtggaaccccgtgcggaccaaacggcagagatcctggaacggctccgaaccggagccgccggccatgcctgcgccggattcctcacgacgctcgatccgctgcacctcgcagacctgctgaccgggctggtgtacgaccggctccggcgcaaatacgatgcagccgcagaaatctaccgtatttcggggcagaactggaaccagaccttctacacgctgctgttccgctacatcggcgacctctccaatcaggacacctatacggagctcgcccggcgtgctacttatacgatggtgcttcgggaaagacgttcgctgcctcggatcgaagccctgctgttcggcacctcgggactgctcgacacctttcgcccggacgactacatccgtcgcctgcgcgatgacttcgcctacttccgtgcacgatacgacatcgaaccgatagacccttcggcatggaaaacggccaatatccgaccgggcaaccttccgcggctgcgcatcgcgcaactggcctcgtttctctcgcagcatgatttcgttttcgagcaactgctggcctgccgtacccgccaggaggtgaaccgcctgttccgtaccgaagcgtcgccctactggtccggagccagacataccccggaaggaccggaggagaaccccaagcgggtcggacagcacaaaacggatgtcttcggtatcaacgtggtcagcatcctgcaatacgtttacggctcctacatccagaacgaagaactccgcgaccgggctatcgccctgctggaatgtattcccgccgaagagaacaaatacacgaggccgtggatcgcagccggagtcaatccccgcaacgcattcgacacgcaggggttgatccagctgtcgagggaatattgcgccgcacaacgttgcgaatgttgtcccgtcgcgcggcggatcatcgataaaatcacccgatcgcaataatcgggaggatacgcttcccaccggcagccatttgttccgcttttgccggcagtcctgatttttcaaaggaaatcatttgggaaaaagcccggcctgcggataacgacggtcggatttcaaaatccgaaaagctgacggcggggataaaaaaacaactgtcaaaaaaatccgattcgcaacggtcccgggaccggcgaattaccgtaaaaatcatgcagacgatcaactggaaaggacacggcgccatgttcggcgccaacgctatttgggggctgatgtcccccgtcgccaaattcgtaatgctcggcggtatcgttacaccgctggctgtcaccgacctgcggatcgtgggcgccatgatcctgttctggatcctttcattcttccgaaagtccgaacacgtaccgccgaaagacctggccaaactcttcggtgcatcgctgctgggcgtggtcctcaaccagggcagcttcatcctgggcgtgggcatgacttcgcccgtaaacgcctcgatcatcaccacgagcatgccgttgtgggcgatgattctcgccgcaattttcctcaaggaaccgatcaccgcgaaaaaggtactcggcatcgccgccggagcctcgggagccttgctgttggtcctcggcagcggaaatacggacagtgccggagggcactccgtcgcgggcgacctgctggtcctgttcgcgcagttgagttacgcactctacttcgtgttgtacaagaatttcgtcacccgttactcgctcacgaccatcatgaaatggatgttcaccttcgccacgctctgcatcctgcccttcaccggccgcgacctgctttcgaccgattggcaggccctttccgcagcagcgatcggctccctggcattcatcgtcgtcggcagcacgtttctgagttacatgctgatcatcgtcggacaaaaaaacctgcgtccgaccgtcgccggcatgtacaactacatccagccgctggtcgctacattagcggccgtatgttggggtatggaaacattcgatccgaccaaaatctgctccgtattgctgattttcagcggtgtctatctggtgacaacaagccgcagccgggccgatgcggagaagtcccgcttacagccggaaagcccccggaaacgacagtagaatcccgcacgccgcatacgcagcgccccggaaacggcgaagatccccggaaatatcgggccttccgtccggaatatgccgaggcgaccctcccggacgccgatagcgaatgaaaaatccgccttattcgaggcaaattcgtattgtattttccgaaataatgaatatctttgacagatttaatttccacacgaaataacaacatcgaaaatatggacatagccgccagtttaatcaagctttttttcggatccaaagccgacaaagatcgcaaagaagtagaaccttatctcgtaaaaatcaaagccgtttatccgacgatcgaggcgctttcgaacgacgaactgcgtgcccgcagcagtaacctgaaaaaacagatcgccgacttcatcgctgcggacgaagcccgtatcgtcgagctgaaagcccgtctcgagctgcccgacacgtcgctttccgacaaggagaaaatctccaaggagatcgacgaaacggtaaaacgcatcgacgagaagatcgaacagaaactcgacgaactcctgcccgaagctttcgccatcatgaaggatacggcccgccgcttcgcccagaacgaaacggtcgaagtcacggccaacgatttcgaccgggagctggccgccaccaaggacttcgtcaaaatcgagggcgacaaggcgatctatgcgacgcactggctcgccggcggcaacgacatccgctgggacatgatccactacgacgtgcagctcttcggcggcgtggtgctccacaaaggcaagatcgccgagatggcgacgggcgaaggcaaaaccctggtggctaccctccctgtgttcctgaacgcactcgccggcaaaggcgtccacatggtgaccgtgaacgactatctggcacgccgcgactccgaatggatggggccgatgtaccagttccacggtctgacggtcgattgcatcgaccgccatcagcccaactcggacgcccgacgcaaggcttacatggccgacatcaccttcggcaccaataacgaatacggcttcgactacctgcgcgacaacatggcttcgtcgcccaaggatctggtgcagcgcaagcaccactacgccatcgtcgatgaggtcgattccgtgttgatcgacgacgcccgcaccccgctgatcatttcgggtcccgtccccaaaggcgacgaccagctcttcgaacagtaccgcccggccatcgagcacctctacaacctccagaaaaacctggtgaccaacctgctcgcggaatcccgccagctgctcggcgaaggcaagaacgaagagggcggcatcaagctctaccgcagccacaaaggtcttcccaagtacaaaccgctgatcaagttcctctccgaacagggtatcaaggcccagatgcagaagaccgaaaatatctacatgcaggacaacaaccgccgcatgccggagattaccgacgacctctacttcgtcatcgacgagaagatgaactcggtggaactcaccgacaaaggccacgaagctctatcgaaatatttcaacgaggagggcttcttcgtcctgcccgacatcggggcccgcatcgccgagatcgaaaaggaggagattactccggaggaaaaggcccagaagcgcgatgccgtaatcaacgactacgccgtcaaagccgaacgcgtgcatacggtcatccagttgctgaaggcatacgcgatgttcgagaaagatgtcgaatacgtggtgatggacaacaaggtgaagatcgtcgatgagcagacgggccgtattctggacggccggcgctattcggacgggctgcatcaggccatcgaagccaaggagcgcgtcaaggtcgaagccgcgacgcagaccttcgctaccatcacgctgcagaactacttccgcatgtaccacaagctggccggtatgaccggtacggccgaaaccgaggcatcggagttctggagtatctacaagttggatgtcgtggtcatcccgaccaaccgcaaggtcatccgcgacgaccgtcaggacctggtttacaagaccaagcgcgagaaatacaacgccgtgatcgaggagatcgtcaaactcgtcgaacagggccgtccggtgctcgtgggtaccacctcggtcgaaatatcggaacttttgagccgcatgctcaagctgcgcggcatcaaacataacgtactgaacgccaaacagcaccagttggaagcgcagatcgtcgccgaggccggacgttcgggccaggtgaccatcgccaccaacatggccggccgcggtaccgacatcaagctgacacccgaagtgaaacaggcgggcggtcttgccatcatcggcaccgagcggcacgaaagccgccgtgtggaccgtcagttgcgcggacgtgccgggcgtcagggcgaccccggatcgtcgcaattcttcgtatcgctcgaagacgacctgatgcgtctgttcggctcgggccgcatcgcctcgatgatggaccgcatgggcctcaaggagggcgaagtgatccaggcaggcctgatgaccaaagccatcgaacgcgcacagaagaaggtcgaggagaacaacttcggcatccgcaaacgcctgctggaatacgacgacgtgatgaactcgcagcgcgaggtgatctacacgcgccgccgccatgccctctacggcgaacggatcgagatcgacctgaacaacatcatgtacgacttcgccacgacgttcgtggagaatcacgaaggcgtcgaattcgacgatttccgtatcgaaatgatccgcgaagcggccatccagccttcgttcgacgaggcggcgtacgaaaaagccaagccccgcgagctgatcgaactgatcgttgccgacctgcaggccgcctatacccgccggatgaaggcgatcgccgatatggtacgccccgttatggagcgtgtttatgaagaccgcaaaggccagctggacaccaatatctacttccccatcacggacggacacctgggctacaacgtcccggtgaacctgcagcgctgcaaggattcggacggggaggagatcttcaaggtattctccaaggtggtgatgttcaccacgatcgacgacgcatggcgcgagcacctgcgcgaaatggacgacctgcgccagagcgtgcagaacgccacctatgaacagaaagacccgctgctgatctacaaactcgagtcgttccagctcttctcgaaaatgctcaacaaagtcaatgccgacgtattgagcaccctcaacaaggcctacatcccggtacgggagaatacggccgagaacgtacagcgcgaacgccaggagcgagccaaagtcgatgtcaataagttgcaggcttcgcgcatgcaggctgcggcacaggcgggacaggccgaaaaacagaagccgatgcccgtgcatgtcgagaaaaaagccggccgcaacgatccctgtccctgcggcagcggcaaaaaatacaagaactgtcacggcaaaggtttataaccgcaaaaacggaccgacgatgggttacaaggaagagaaacaacaccagctcgacatgcgctacctgcgcatggcacgcatctgggcggaaaactcctactgcgtgcgccgcaaggtcggggcgctgatcgtcaaagacaagatgatcatctcggacggctacaacggcacgccggccggcttcgagaatatctgcgaggacgaaacgggtaagaccaaatcctatgtcctgcacgccgaagccaacgccattaccaaggtggccaaaagcgccaacaactgcgacggctcgacgctctacatcaccgccgccccttgtatcgaatgttcgaaactgattattcaggccggtatccgacgggtggtttacagcgacgattaccgctccgaagagggactcgacctgctgcgccgggtcggtatcgaatgcgtacagattccaggagaagagtagccgcccggaattccgctgacacgaatcttctatccgcaaacaaatcgaggggagcgtattctacgctcccctcgatcttttataaaattccgtcaacaacttacctcatccgagcgaacgacgagagtcgctgaaaaaccaccggatgcggttccgacttcataccgcgattgctccggaacgaagccgtccgcgcaacagttgcaccctttcgagcgacatccgccttgcgcgtcaatacaatatccgagctaccctggtagtcgataccgtattccccgtaaccgtcgtaaatcacacttggatagtaaatcgcaccatccgcctcataacctttaaccgtaagggtctgaagatcctccgagatttcgacctcgaatctcttgccgaacaggtaataatttccttcgcccgacataccgatcagatagttcttgtagttcttcaagtaatggaacaacgtttcatcgtctgccggaacactcaccgttccgtcggatgcaatttcgaggaaccacttgggtccatagtcctgacgcgctgcaacctcattcccctcccaaggattgtacgactccgtacccggaacttttccggccataagatcctccggagtaaaatacggcaaagctccgtcataatcgaacccgagacataccaaacggttctgcgcccgatagtccgccgctgtctgctcatcggctccggcggcaatcgtcacggggaaggaaacctcgatgcctccgcccattccgccgacacgtccggtcatggtcgccgtccactcgccctgcaaggtcgtgaaaagttccgactccaccggcggcagcatgggagccgtcgccgtccgagccagctctttggccaacgcaacgctaccctcggtattcgccactgatacgatcaccacatactccgtgtccgggtgcagtttccgatgggaattcaccgctccctcgggttcgagcatgagcacaatactctccgaatcgatcggattgccgtaattcttaggcagcgtttcatccgtataaccgttttcgagattcgcctcgtagttgctcttggtgtcgaaatagtagtaacccgaagaggcattggccgctttcatggtcacgatcagactcttgtgaggatcatatccatccgttccgtcacccggaacgatcgtaacctcgatcgtcggcaatgccatctgaggctcacccgaacgacatacagtttcgacgatctcggtaggcacatccccgaccataccgtaaacgaccacgcaataatcggtattcggagcgattccgacgtcccacactttcgtctgcacgccctgaagcggttcgctgtaacgcagcagcatcttcatcagttccggacgagccatatccttgtaattcaactcataatcatccttctcgaaaggaacggcataatatgaatcaaccgcctcatcaggcgttatcttcacggccagcgccagcgaagtggtcttatccaaatcctgctcgacgacgatctgcgccttggagtattctacctctttcgtagtcacggacaccgaggttatctcgcccttaatgacacccttctcgtcgcagacagcagcaagaatcacatagtcggcctttccgagaatgaatatcgtggtaccgtcggggtaagcgtcgccgttctttaccgtataactctgggtgcccgtaccccgtttaccgtctttctgcaacaagtcggccggctggtaaaatactccgaccactccatcgtaaaaactcttatcgtaaaccacgtgcaggtattcattgccgtcctttccggccgtaacggtataggccagcgaattgaaatcggtatctccggccttcaattcaagcttatcgggtatctcctcagaaccaggcggaacgggaggaacatcttcggtcttgtccttcgagcaagccaacaacccgctcagacaaagcatcagcaataaaaatcttttcatagaacttcaagaataaaatgatacaataaaataatatgtcaatagtaaagataatatttttctttataatttatcataaacggtctattatttttcaaaaacgagctttttttttgaccccggcatgaaaaaaatcgaacgacctcactcaatcactcgaatcgtattacctttgccgatcgtacaaatcactcgctacttatgaatcgaatcgtcatcctcggggccacttccggcatcggactggagatcgccaaactgtatatcgccgccggctggcaggtcggggccgcaggtcgccgcacggaaaacctcgaagcacttcgggcagcggcgccggaccgggtaaaaatacgttcgatcgacatcacggccccggaagcggaagagcggctgctgcggttgattgccgatctgggcggctgcgacctgctgctgcattgcgcgggcatcggctacaacaacccgcagctcgacgccgcacgggaaatcgcaacggcggaaaccaataccgtagggttcacgcgcatcatggacacggctttcgactatttccgcaggcagggcggaggacatctggcagcgatcagttcgatcgccgggaccaaaggcctcggcgcagcggcggcttactccgccagcaaacgctaccagaacacctatctcgacgcattggcacaactctcacggatgcaacggctcgacatccgcatcaccgacatccggcccggattcgtggacacacccctgctgcgcgaagggaaatacccgatgctgatgcgccccgaaaaagtcgccgcacgaatcgtccgggcgctggaacaacggaaacggcgcatcgtcatcgaccgccgttacgccgtgctggtatttttctggaggctgattcccgaatggctctgggagcggctgccgatccgcacgaaataaggcccgtcagcaagatttctcccgacaccccatgctcccgccacagctatccacctctaaaatttccccaatgacatcccaacaaatcgctgccatcgccgcccgcaacacagagaaagcccgacggatcatccgagataccggcatcatcgacatctgggaatccgccggagccgaaataaacctggtcggctcgctcagcaccggtcttttcatgaagcaccgggacatcgacttccatatctattcggctgtcctccggccagaagatgattttaccgctttagcgaagcttgccgccaatcctgccgtcaaacgaatcgaatacggcaacttgctggcgacggaagagcggtgcctcgaatggcacgcttggtacgaagaccaggaaggcgaactctggcagttggatatgatccatatcgagaaaggctcccgctacgacggctacttcgaagaggtggcccgacgcatttcggcggccctgaccgatgaaacgcgcgaggcgatcctgcggctcaagtgggaaacgctcgatacggaaaaaatcgcaggcatcgaatactacatggccgtcctgcgggacggcatccgcagctaccccgatttcgttcgctggcgcgaagcacatcccctgacgggtgtagcggagtggatgccctgaaccggatcgccccctatctccatccggcagcgctgcgataccgtcggcgcccgaaatacagacctataaggccggggggagggcaaatccggtcgtcatcattctcagcctcgggaaatattcaccgacctgccccgcttccaacaatccccttcccccaaatattgtcggataaccgccggacacgcacccgactcccgaaaggtaaaatcccgccctcatatcgggccgaaaaaaatccgccggacaggtaaaaccggcccggcggatattcaattgtaatagtatggaaaatcagaacgggagatcgtccggatcgtccgcagcaggcgtaacgggagtctgggccgcaggctgctggtacgaaggctgcgccggctgctgataggacggctgtccctgcggctgggcatacccgcctgccggagctcccgccgactggttatccccacggcgtcccaacaacttcatatcgtcggccagaatttcggtcgtataacgcttgttgttatccttgtccgtccactcgcgggtacgcaggcgcccctcgatgtaaatctgcgatcctttattgacgtagcgatccactacgtcggccaaaccgcgccacaaagtgatcgtatgccactcggtatgttccttggtttcgttggcctggcggtcgaacagccgttcggtcgtcgccagacgaacccgggcaactttcgctccgctttcgagcgtgcggacctcgggatccacacctacgttgccgatcaaaatcactttatttaccatatcgcctcgttataagttttttatcatctccataaagagctcggccatcttcacgccggctttggccccctgacgctgcacatcctcgtggtcgccgacctcatcgctcaacccgcagttcgtaatgaccgataccccgaaaacgggaatcgacatgtgccgggccacgatcacttcgggcacggtggacataccggcggcatcgccgccgatcgccttgaaataacggtattcggcctgcgtttcgaacgtcggacccgtaccgcccacgtaaacgccgtactgcaacttgattcccttctcctcggcaatacgggtcgcacggataatcaagtgctgatcgtaacagttgtgcatatccgggaaacgggggccgaactcggccatgttggggccgatcagcggattgggcatcaggttgatgtggtcggtgatgaccatcagatcgcctacccgaaacgaaggattcacgccgccgctggcgttcgatacgaacaggtagcggatcccgagcagcttgagcacccgcacggggaacgtcacctgctgcatggtgtaaccttcgtaatagtggaaccgcccctgcatggccactacgcggcgcccttcgagcaaaccgaaaatcaattttcccttatgtccctcgaccgtcgaaacgggaaaattgggaatctccttatagtcgatcgaatatttctcatcgatacggtcggcgaaatcgcccaatccggtaccgagaataatgcctacttccggttggaagttttcgatgcgtgcctgaatgaaggccgcagtctctttaattctctctaacatcgcactctaatttttggagaaaatccgtttccgaatcatctatgaatgaaatattgatgggcaggaaatacattctcttgcgtacttccgccggtatcttttcgggatggctcatcttgaccgcgtccttttcggtcatgatgatcgccgccttcgggtgttttgccagcaaattcgctaccaatttcatatctttcacccggtaaacatggtggtcgtcgaaacgaacgtcctcgatcaccttgtaattgttcctcaatccctccacgaaaggtcccggattgccgatacccgacatggcgatcacctgctgtccgtaattcagttcctcatccacgaactcagggaagagcggccgaggccggaaactttcgaaacgggtaaagtaaacacgctgataggcgacctgaaccagaaccttgcgcaggatgcgccggtctatcggagccatattctcggggcatttggtcacgatgaaataatgcgcccggtgcaactgttcgggcaaatcccgcagattgcccgcaggcaacatccgatcatgctgcacgggccgtgtcgcatcgatcatgacgatattgactttaggctctacgtaacggtgctggaagccgtcgtccatcacgacgagatcgacctccggatgctcctgccgaagacggcggatcccctctgcccgtttctcgcacacgaccacgaccgtatcgggaaatttgcgcttgatctgcaacggctcgtcccccacttcgcggtagtgcgattcgggagtgacctcaatatatcctttcgttcgccgcccgtatcctctggaaatcaacgctacgtgatgcctttgagccatgtaggcgatcaccatctcggccatcggggttttgcccgtaccgcctacggtgatattgccgatgcagacaaccggaatatcgaacttctcctgtttcagaattccccaatcgaaaagccggtggcgcaacaagacccccaacttataaaggaaagaaacaggcatcaaaaaaaaattcgacattctcaatactggtttatagcaatcaaagatagcaacaattcaatgaattacaaaagaaacaccccaaaacttggataatccgaccgcagagcagcggaaattttgttttttttcttatctttaccggaagaaaacttccgttaaaaatcaggatacatcccgaccggactccaaaaaatttgacccggttcgcagttttataccttaattattaacatgatcaaacaactgaaaccagctgtcgtattgttagcaggcctgctcttttttgcaggatgcggccgcacggcaacggatgccgaagaaaattccgatgaaatcatagaacccaaccttttatacggcattcccgccgacaactaccggctcgaacagcagatcatcgaccgtggcgaaaccctcggtcagattctgaaccgatacggtgtttccgccgcccagatcgatcagctcgacaaagcgtccaaagacgtattcccgctccgcaacatccgggccgggcgcagctacacggctttcatccacgaagattcgctcaacgcgccccatctggactatctggtgtacgaacagagcatttcccagtatgtcgttttcggactggccgacgactcgatcagtgtcaccaaaggcgaaaaagagtatgaaatacgtcgccagaaaaagactgccacgatcgattcctcgctctgggaggcgatcgtaggcgccggcatgccagcctctctcgccgccgaaatggaggacatctatcaatcgacgatcagtttcttcagcatccagaaaggagataacttcacggtcatctacgacgagcgttacatcgacaccctaccggccggcatcgggcgtatatggggtgccaaattcaactacggcggcaagacctattacgccattccgttccgccagggcaataaaatcgcctactgggaccaggacggcaacagcctgcgcaagttgatgcttatcacgccgctcaaatatacgcgcatcagctcccggttcacctattcgcggctccaccccatctacaaaacctaccgagcccatacgggcgtcgatttcgcagctccgaaaggtactccggtacacgccgtagcggatggcacggtcatcttcaaaggctggggaggcggaggcggcaataccctcaagatcaaacacaacaacggttttatgaccggttatctgcacttgagcggctatgccaaagggattcgccagggcagccgcgtatcgcaggggcagttgatcggctatgtcggcagcaccggagcatcgacgggtccgcatctggactatcgcgtctggcgcaacggcaaaccgatcgacccgctgaaaattccgcaggaaccgggcgaaccgattcacaaagccaaccgtgccgcttacgaatatgtccgcgaccgaattatggccgaactggacggcgaggtaaaggaagaagacaagatcaaacaactcgactcgatcgtactcaccccgtcgaaaacggcagacagcctggttttcagcagtaaattatgatcgacccgcgcattgtccgctttatcggccgacaccacgtcctgacactggcgaccgtcgccggagaacagccctattgctcgcacgcgttttacgcctacgacccagagcgcaatctgctcgtattcgcggccgataagacgacgcgccatgcggaggagatgcaggcgaaccggcaggtagcgctgggcatcgcgctcgaaagcaaggcagtgggcaaacttcaggggctccagctttgcggaacggtgcgggaagcggacgaagaggcacgaaaaacatatatccgccgcttcccgttcgcagcactcgccgagctgacgttgtgggttgtagagatttcctacatgaaattcacggacaataccctcggattcggaaagaaactgatatggaacagcaaggaacaggagtaatcatcgtcgccggcgggagcggcagccgcctgggaggtccgcttcccaaacaattccgcatgctgggatcgctgccggtattgggccatgcgataaacgcctttgcaagaacgctgcacagcacgcagatcgtcgtcgtccttcccgaaggacagatcgatttctggaagaatctggcagcccgtttcgacatagccaagcacacctgcacggcgggcgggccgcaacggttccactcggtacgcaacggcctgtccgctctgccccgaaccgtcgcactgatcgcggtccacgacggcgtacgtccgctggtatcgtccgacttgattttgaaagccgtggagtgtgcggcggcccacgggacggccattccggtcgtcgaagccgtcgattccctgcggcagctcacacccgacggatcgcacccgatcgaccgcaatacgctgcgaatcgtacaaacgccccaggtcttcgacgcggaattgctccgtcgtgcctatgaactcgactactcccccgacttcaccgacgacgcctcggtcgtcgaacgggcgggacatgcggtcacgctctgccacggagagcgcggcaacctgaaaatcacgacagcggacgatcttccgatcgctgaagcaattcttttatccagagcatcccgtgaagaaaatctataaatacagcttcagccgccacacgctttcgctcacgacgatctacctcacgatcttcctcgcactggggatcgggctctactttctatatgaaggaggctatctttcggcctggttcttttcgttcatcgtggcgctcgtcgccctgatgtcactctccattccgcgtcgcatcctcgtggacgacgaaggactgcatatcctctgtctgctcgacatcacggagcttcatcccgaagagatcgcctccgtacggcaagtcgagaagcaggaactccgaggctacgtgccctatttcggcggttacggatttttcgggttctacggacactatttcgacctgaaaaatctcgaaagggtcaaaatctacgcttccgaatggcggaatttcgtcgaaatcaccgatatatatgaaaatcggatctatgtctcctgtacccagggagaagaactcgtaaacgacctacgggaactcatctcgcacgcccgagaacgacgagcacaggagctacagtcccaggaaacgacggaaacacgatagttttcaccttccgacgtcaaaacaaaagacaccggcctctacacttctccccccctctcccaaattctcttcccgaaggggatctcgattcattaccttccccaaaaggatgctatgttgtgtatatcagtatctgcatgttaagggatgataaacgcacgaattccgaattcgaaatacgatacacgacaatccggcctacattaacgcatcttacgattttccattcgccgcagaaaaacaatcaggggaaactgtgtaccagtttcccctgatttcaatgtatcgttcaatcttaattcagattcggcaggaaggagtaatcccggctgtattcgagcatctgcttcacgtagtcgttcggataagaaaccttcacatccacgaccttgccgttcttctccaccagctcgtactgcggattcacaaaaccgctgtaaggctcgatatcgagggctttgtaacgggtcagcacttcggcgtgcagcttcggatcgaccgtcacggcatatttctcgaccagtgctttgccggcctcgaaatcgccttcggacttgatacgctgcacctcgcggagcatacgacccaacagctcgcgcagcttcgtataatcattcaccacgacatacgttttaccatcctgctcgatccactcgatcacgttgtcggccttcccctgctcgtagcaccattcggcgatcagcttgcggttgcgcatgtgcgcctcctcgacattcttgcccggctcgatacgtgcgagctgcgtcatcataccattcatgatataccgggcatattccgcatatgccacatccagcgacggaatcaaccccaattcgaccattttcggatcgcccaggtagtagagcccgaaaagatcggcacgggcctcctcgagcgtcgaggtatagttcttcaactcaccgcccttcacacccggagccaactgcccggaaccgtgtcccaaacattcatgcaggtcggtatgcagatcgtcggccaacttgccgtacttgtcgatacgttcgcggtcttcgggacgcagcatgaactcctcgaggaatccgtcgccatgcgccgcctgggcataagcgtaggtaatgttgtcgatggtcaccgacttcgaaccgtgctccttgcggatccaatccgcattgggcagattgataccgatcggtgtcgcaggataacagtcgccgcccagcatcgctgccgtaatcactttggccgaaacccctttgaccacctttttccggtaggcggaatctacaggcgaatgatcctcgaaccactgcgcattctcggagataacctccgtacgatgacaggcctccttgtccatgaaattgaccagcgactcccacgacgccttgcgtcccagcgggtcgccgtaatcttcgataaacccgttcacgaaatcgacgttggatacggtatcccgcacccacaggatgttataacggtcgaaatcgtgcaggtcgccggttttgtaatagtcgatgagggctgcgatggtcgccttctgcggctcctgggcaacgccttgcgccttctccagccagtaaacgatcttctcgatcgccggcgaatacataccgcctactttccacacccgctcgcggatcgttccgtcctcatccttcacgagcttcgaattcaatccgtaggagaccggttcgggatcggcaggatcggccatgctacggtagaactcttccacttcggcctgcgtcacgccttcgtaatagttgttggcggaagtcgtcaccaaatcctgaccttcggcctgattgagttgggtcttatagagttcgggattgaaaatcgcctcgcagaccacagcccgcagcgcattgagctcatcgccgaacttctcgacggggatcgactcggcaaccgcgaggaaatactccttcggaaattcgggtacgaacttgtcgttggaatagtggtgatgaattccgttggcgaaccacacttttttgaggtacttctccagcgctttccattcgggcgtcgtccggtcaccgtcgtaattctcataaatcacctccaacgtgcggcgcacgggaaggttgtatttgaaattctggtcgaacatgatgtcgcggccgcatttggcggcttcggccaggtagtagatcaactctttctcccgaagaggcagctcggcaaagcccggcacctcgtagcggagaattttaatatcgtcgaagcggtccaggatccagggagcatcctccgtcttcttttcatggcaggaaatcatcgtcgttgcggttaaagtcaaacaaattgcactcaatcgggtcttcataggcaccaggtcgtcggtttaacgggattttacaaaacagcacgaacgaaacacacggcctcgattcgcgcatctttgcaaagatacgaataagccgggtacaaaagcaaatttatttgcattttgccgcaatgaaatatccaattatccgatccaaatcgaagacagagaaaaatgagaacaatcgtacaggcttatacacaaaaatcgcccaaccgcttcctatctgtgacaaggataaacaaatattcacccccggcaaacacggaacatcggtcccccaacagtccgaccagctccgataaaaccgaccgcaactggttcaatccgacacacaaccctttcgggttatttcgtttttcagacaaaatacgtttcacaccacacatcgtccacaaccgaacaaaaaagtcccggtcggaaaataccgaccgggactccaattagcgttccgcatatccggacatcgatgcccgacacggcttcaattatctaacgaccgatgcggacggcgtttcatcattactatgccaagtaccggtccacttgtaatttgtctcgaaatacttccggaatgcttcgatctgcgccgaagtagcccaaatatcgaccagattagccgcaggaatgaaattagcaggatctgtcaactttgtattggtatagatattgatcgaaggatagatccatttaccactattaggttcactctcccacttctccaaataagagccggaaagattcagagaagtcaattccgtacaaccagttacggtcacagcaacaatcgcccgacaatcctttaccgtcacggattcgatcttcggacatttatccagttcaacacgcttcggcccaacctccgtaccggccgcacctgtcaccaccaacgagaaagtcgtcaggctctgaagaccgttgcaatcgattgccgtcaaacctttcaccaacgaaatatcaaccgaagtcagattgatattaccaacagccaaattcgtatcatccaaagactccaacccagacaccttcagcgtcttcaaattccggaaatattcgataccagccaaagacttcacttccgccgcattgtcggcattaagctccaaatccgtaacccgatcggcttcctcctgcgtaatacccccatcggaacattatcgaccgttacagctccttgcgcaaccgccgcagagtgacagcgtgtgcaatcaaatcgacaccggccagcagcagggacaatcccacccagaacacgactacaccgacaccgataatcggattgaacagaacgagaaacgcggaaataatcacgagaatacccagcgtcatcgtccagccggcgcccttgatacccacacccatcatctcgctggcgacgccgacggccatgaatccccggaagaggagccaaaagccgagcacgaacggcaggatcgtgaagagcatcgacggggtgcacagcagcaggatacccagcaggatttcgactacaccgcctgcgatgtaccatcccttgcccgacccggtgggagccttcgtacccagatacagttcgaaagcgcccgagagaatcacgacgatcccgaacagcacggaaagcgcgagataagtgccgcccggctcgaaaaagacgacgatgcccacgatgaagaaaataataccgagcaacatggagagctgccaattgtcgatggagtgtcggaatcgaccgacatcataaattttatctgccataataatacgaatttaagtttctacctggtatccgcaagaaacctgccaaacccggaatagcctttcgaccgcatggattcggagagatggagcgcccttcccattttttgaatttttctcttccgattcttaattgttatttctacctttgccaccgtcaatacgactaacttttcaaaccaagaaaatggaaacaatcacaaacagcgaggaactgcgccgggcactcggcagccgggaccggtccggcatcggattcgtcccgaccatgggtgcgctccacgcaggacaccgttcgctggttgaacgcgcacgccgggagtgtgcgaccgtcgtggtgagcgtattcgtcaatccgacacaattcaacgacaaaaccgacctgaaaaattacccccggaccccggaagccgacctgcgcctgctcgaagaggtcggtgcggactatgttttcatgccttcggtcgaggaggtatatcccgaacccgacacccgcacgttcgacttcggcatgatcgacaaagtgatggagggtgcgacccgacccggccacttcaacggcgtggcacaggtcgtgagtcggcttttcgatctggtgaaacctgccaaagcctatttcggcgagaaggacttccagcagatcgcggtaatccgcgaaatggtacgccaactgcgcattccggtcgagatcatcccctgcccgatcgtgcgcggagaggacgggctggcgctttcgtcgcgcaacactctgctcgatacggatcaccggacggcggccccttatatatataaggtattgaaggctgcggtcgaaaaatcccatcagacgacacccgaccagctcgcagcctgggttacggcacaggtagagagcaatccgctgctgaaagtaatctactttcaggtcgtagatgcggcgaccatgcaacaggtccgcacctgggaagagagtccggttatacagggctgcatcgccgtacaggccggagatattcgtttaatcgataacatcaaattgcgatgaaattccagatcgaagttctcaaatccaaaatacaccgcgtttcggtcacacaggccgacctgaactacgtgggcagcatcaccatcgacaaagagttgatggatgcggccaacatgatcgaaggcgaaaaagtacaggtactggacgtcgataacggcgaacgcctcgaaacctatattatcaaaggagaacggggcagcggtgcgatctgtctgaacggccctgccgcacgcaaggtgcaggtgggcgacgtcgtaatcatcgcctcctacgccctgctggatttcgaagaagccaaagccttcaagccctgggtgatattcccggatacgaaaaccaacaagctgatccggtagaaaactccggcaaacgatcgaaaatcctgccccgcaacggcaggattttttcatacgcggtacgaaccgtcaaaaatgcccctaaatatttggtgacgcagtcgataacccatatatttgcataaaagttcccgaaaagcgaggacatacgccaaacaagttcggcacagcctgacggagaaccgaaaaaacgacgcaacctattttgccggccgcatttttatggacatagcgctttcgatcgcagcattcctgttttcgatcacaggcatcgtcggatgtatcgttccgatcatcccgggcgtagcgttgagctacgcgggattactctgcgcctccttttgcagctattccgaaatatcgtccgcgacactttggatctggctggccgtgacagtggccgtttcggtcatcgactacttcctgcccggctatttcgcacgtctggtgggcggtacgcgggcagggtcgatcggggcgaccgtcggcatgatcgccggatttttcgccggatttttcgccggcggattggtcggcgtcatcctcggccctttcttcggcgcggtcatcggcgagttgatccacgaccgcagcgactcggccaaggcgttccgttcgggcttcggctccttcctcgccttcatcgcaggtacgggactgaaactcgtagccgccatctggatgatctgcctcgtctggtcggacacctaccctgtcgtaaaaaactggatcgtaacaacattctaaaatataaaccgtatgaaaaaatttctgttattaatcgcggcaacggccttcgcgctgcttaccacggcctgtaccgattcatccgggtacacgtacgaaacggtcaagaacgacccgctcaagacccgtatctacacgctggataacggactgaaagtctatatgagcgtcaataaggcagaaccgcgcatcgaaacctacatcgccgtgaaagtcggcggcaagaacgacccgagcgaaacgaccggtctggcccactatttcgaacatctgatgttcaagggcacccaacagttcggcacgagcaactacgaagccgagaagcccctgctcgaccagatcgaacagctcttcgaggtttaccgcaagacgaccgacgatgcggagcgtgcggcaatctaccgtcagatcgacagcatcagctacgaagcttcgaaatacgccatccccaacgagtacgacaaactgatgtcggcgatcggtgctctggaaaccaacgccaacacctcgatggaccggacggtctatatcgaaaacattccttcgaaccagatcgagaactgggccaggatccaggccgaccgcttcaagaacgtcgtgatccgcggattccacaccgagctcgaaacgatctacgaggagaaaaacatgtccctgacggacgacaaccgtaaggtttacaccacgatcggcgaagtgctctatccgaaccacccctacggcaaacaatccgtactcggcacgcaggaacacctgaaaaacccgtcgattaccaacgtaaagaactatcacacgcagtattacgtgcccaataacatggccatcctgctttcgggcgacttcgatcccgaccagatgatcgccacgatcgacaaatatttcggcgatatgcagccgaacgagaatatcccgcagctcgccttcgaacccgaagccccgatcaccaaacccatcgtcaaggaggtttacggtcccgacgccgcgaacgtaacgctggcatggcgcacggacaacgccgcatcggacgatgcggaatacctgctgttggccagccggatcctctacaacggacaggccggcatgatcgacctcgacctgatgcagcaacagaaagtactcgacgccttctcgtacccggatcagcgggccgactacggagccctcgtgctgcaaggtcttccgaaagcgggtcagaccctcgacgaggtccgggatctgttgctcgcagaggtagcgaaactccgcaacggcgaattcagcgaagagctgatcaaggcggtcgtaaacaacctgaaagtatcgaccatgcgcgaggaagagacgaacgtgggacgtgtcgaaatgtacctttcgtccttctacaacgacattccctggagcgacgaagtgaccaagctcgaccgcatcggctccatcaccaaggaacaactggtggcctgggccaatgaaaaactcggcaccgagaattacggcattatctacaaacgccagggagaggaccccagcgtgcagaagatcgccaaaccggccctcaccccgatccagatgaaccgcgacacccagagtgcattcctgaccgaaattcaaaattcgacggtaactccgatcgaacccgtattcgtggatttcaaccgcgatatggagattttcaaaaccgattccagcctcgaagtcctctataagaaaaatgacatcaacgaccttttctcgctgacctacctcttcgataccggcgtgctgaacgatccggcgctcaacaatgccttcgcttatatcgactacctcggcacccaggccaagacagctgcggagatcgcatccgaactctacgacatcgcctgctactacgacctgtcggccagtcagaaccgctgtgcgataaccttcaagggattgagcgaaaacatgggacaggtcatggatatcttcgaagacctggtagccaatgcacagggcgacgaagagattctcgccaactacaaggccgacctgctgaaaaaacgtgcagacaacaaactgaaccaggaagcgaatttcgcagccttgcagcgtttcgccttcttcggcggagaagctatccagcgcacgaccctcaacaacgagcagctcgaagcgctcacgtcggacgtactgatcggcaaggtccgcgacctgctgaaaaagcagcacaccatcctctattacggtcctaaggacaaagccgggctgctcgccgacctgaaagcacaccaccaaacgccggaagtgctcgaaccgctgactcggggaaatatcgcgttccagcctacggaacagaacaaggtctgcctggccaactacaacgcgccgcagctctacttcctccagtactcgaacctgggcaaaaaattcgacgtagcggtcgatcccgctctgaaactgtacaacgaatacaacagcggcagcatgggagccatcgtcttccaggagatgcgcgaatcccgcagcctggcttacatggccttcacggagtggatcaatccgagctacctggacgacaattatcttttcgcagcgatcatcgccacgcaaaacgacaaaatggcccaggccatcgacgcattcgatgagatcatcaacaacatgcccgaatcggaagcagccttcaaactggccaaagaagccgtactgaccaatttgcgaacctcgcgtacgatcaaggacgaagtgctctggaaatacatcgccaacaaagatctgggcgtaacggaagaccgcaacaaagccatcttcgaaaaggtccaggacatgaccttcgccgacctcaaagccgcccaggaacagtggatcaaggaccgcaaatacacctattgcatcctcggcgacctgaaagacctcgaccaggattacctgcgcaagctgggcccggtacagatcgtgagccaaaaggagatgttcggctattaattccaccgacccgatcattcaaaacgtcttcggaaaaatccgaagacgttttttatcctcctttccccggaggcaaagcaagcggtacgtcctgtttcggatgcaccttactcgaccaatcgcccgcagcccgaaaacaataaacccggcgtcagacaaactgacaccaggtttattttcgggaaccgaacggaacccgatctattttaataccgataatgctcggccttgtaaggaccctcgaccggtacgccgatatagtcggcctgttttttcgtaagctgcgtaagctccacaccgaggttatccagatgcagccgggcaacctcctcgtccagatgtttgggcagacgatacacgcccacctccagtttcttctgccacaactcgatctgcgccagacactggttggtgaacgaattgctcatcacgaacgaaggatgtcccgtagcgcaacccaagttcaccaggcggccttcggccaggataaagatcgaatggccgtcggggaaggtgaacttatccacctgcggtttgatgttggtacgcacggcatccgaagcctcaagacgggccatctggatttcgttgtcgaaatggccgatgttgcagacgatcgcctggtcccgcatccgctgcatgtgctcgagcgtgatgatgtcgcagtttcccgtgcaagtcacataaatattaccctcggccagagcactctcgacggtcttcacctcgaaaccctccatcgcggcctgcaaagcgcagatcgggtcgatctccgtaacgatgacccgggctccgtacgaacgcatcgaacgggcacagcccttgccgacatcgccgtaaccgcaaacgaccaccaccttgccggcaatcatcacgtcggtcgcccgcttgataccgtccgccagcgactcgcggcaaccgtacaggttgtcgaatttcgacttggtgcaggagtcgttcacgttgatcgcaggaacgagcagttcgcccgcctcctgcatctgataaaggcgatgcacgccggtcgtcgtttcttcgctcacaccccgccactcggctaccgttcggtgccatttgccgttatcttcggccagaatcttcttcagcgtatcgagaatgacctcctcctcgtaagacgacggttcgtaatccagcgtcgaagcgtcgttttcggccttataccctttgtggatcaacaacgtggcatcgccgccgtcatcgacgatcaactgagggcccttcccgccggggaacgacatggccatcgccgtacaccaccagtactcgggcagcgtttcgcccttccacgcaaatacgggaacccccgcttcggcgatggccgccgccgcatggtcctgcgtcgaaaaaatattgcacgagcaccagcgcacgtcggcgcccaactcgaccagcgtttcgatcaacacggcagtctgaatcgtcatatgcagcgaccccatgatacgcacgcccttcaacggtttctgcgggccgtacttgcggcgtatggccatcagtccgggcatctcgtgctccgaaatctcaatctctttccggccccattcggccaatgacatatcggccactttgtaaggcagggataaatccaaaaacatactttttatcatttaatcaattatacataatctcttgccgaatcgttggctctcgtcggccgcattgcgacaccgactcccgccgaagggaatcgaagccacgaagcggtaaacacggcctccggccgaaaaacggtataaaccgccgcacggtcatcgccgccgattctccgaactcaaaatacagctgcgatcccgttcgatctggcgctgcaactcctccagcgaatcgaacttgcgctcatcgcggatcttacgccgcagctcgacccggagtctccgaccgtagagatcgcccgaaaagtcgaaaatatgggtttcgagatgtcggggacctccgcccaccgaggggttgctccccagattcgacatggccttatactccacgccgtcgatctccacacaagactcatacactccgctttcgatcgtatccgcatccgcaacctccatattggcggtcggaaatcccaactcacggcccagttgccgtccgtgcatcacctctccttcgatccagacagacatagcctcaaatcttttcggtcagcttgcgcaccagggaaatctgggagaaaaactccttggcgaaaacccgcagcacggtataaagcggtatggccagcagcatgccgatcaccccggccaacgacccggcgatcaggatcacgagaaatatctcgagcggctgcgccttgacccgctcggagtagagcgtcggttgcagcacgaaatcatccagccccttcaaaatcaacagcgatcctgcgatgaccagcatcgtatggccgatcgacatcccttcgatcggggtgatgatacccatgcagaccgaaaccgcgccgccgatggtcggaccggcgtatggcacgacgttcataacccccatgataagaccgatgaaaaaggcatcctgcgccctcatgccgaaagccatcatcaccagcgatacggccagcatcaacaggaagctctcggccaaaattccccggaagtagcgagacagaagcactgtaatcgaattgagggcatgcgtcacgttctgttggtatcgatccgggaaaagtgccgttaccatcgcatagaaaagtccgtcgtcccgcaggaaaaagaacgtgatgaacgaaatcgaaaaaaaggcgattacgctcgaaacggccagactcaccaccgatgaaaacgccgtattgatcgtgtcgaaattaatcagcgactgcaggaaagaaatcagcgtgtccttaaacgacacctgggtttcgggcaacgagaagaagtgagtgagataatcctgaatacgctgcagcggctcctcgacagaagtcagcaccgtcgaaaaatcgaggtgcgccaactggtagagcttgttggtcaccagcggcacgaaaagcccgcacatcaccgcgaaaacgatccagatcaccagcagcgtaacgagcgctccgcaccagcgcggcacatgccatcgcccgatccggcctcgggatatccgggctaccagcgggcgccccatgatggccagcaccgccgaaaccagaatgtagatcacgatggagctgaagtaccacatcaaaaagaggacgacggccgtaatgaccgcccccaccgtaaaacgaagcaatgtttgaggtgtaatactcatacgtaccgcaacgcgaaaaccgccgccaataagttacttcaaccgggcgatgggagtttgcgatcccacgacaggatccccgatctccacgagcaattcggtatccttcggcagaaggatgtcgatgcgggagccgaacttgatgaacccgcaaaccgaattttgctccaccttcgagccgactttcatataggaaacgatacgacgggcgatcagacccgcaatctgacggaagagcacctccttgccgtcgggggttcgcacgacggttgtcgtccgctcgttctcggtcgaggacttgggatgccacgccaccaggaaacgccccggatgatacttgaaatactccacggtacctccgaccggcacccagttcatgtgaacgttggtaatcgacatgaagatcgaaatctgcagcatctcccgatcgaggtattcgctctcgtgtaccatttcggtcactacgacccggccgtcgcacggagcgaagaccaactccgcatcatggatcttcacacgccgcggctcccggaaaaatgccacgataaagaaccaaaacagcacaagcagaatggatccgaaccagagcagtcccgcttcggcatggcgcgacatcagatagtacatcagcgcccaaagcaggaaacaaacgactcctgtcagcccgataatcttgtagccttccttgtttattttcatattcggatagtaagttttcttatgaaatatgcagcaataccagataagcgaccacgaacggcaacgagaaaatgagcgcatcgaaacggtcgagccaaccgccgtgccccggcagaatattgcccgaatccttcacgccggccgcacgcttgaacatcgactcgatcaaatcgcccaacacaccgctcacggcagcgatcgcagctaaacagcaccacagccaatagctaccgtcgagccaccatgcggcaaggcagcccatggcgatcgcaccgacgatgccgccgaagaacccctcccacgacttgttgggcgaaatccgctcgtaaagatgatgtcggccgacgctgacccccaccaggtaggcgaatacgtcgttggcccaaataatgaagatgtaggccaaaatcacccagggattccagccaccctcccccgtcagcagaggcagataggccatcatcgacaaaggcacggccacataaaagacgcctccgagcgtcgcccccacatcggcggcggggcgggcacgcttgaggaacagttcacagacgaacatcagtggtatgagcaaaataaaaaccggcaacaaccacaagaggacggaaagcgctctcggcaacaacgccacctgctccgcagaaaccgccagcaggaaactcgccacgaaaagagccgtacccgtaaccagtccgagccatttgagagggtaaatatcctcccggcgggccatccggtaaaactcccacataccgccgacgagaatcgccagcaacagcactccgaaactccactgcgaccaaagcaccgctccgactaccacgacagtcaggacggcaccgctcaaggttcgcaccagaagattcctcattttatcagacataattcaacctttttcgggtaaacctcgttaaacttcaggcgtttccgccgacgattttccgtccgacacagcggaagcggcggttccggaaatcttttcttcgtcctttcgggactcggccggcgcaacctcttttttcccggctgcctcttccgcatcgccagatgcagctttccgctccgccaaagccttctgctcggcctctttccgttcccgcagaatatcctttttccgtttaccgaagatacgctccacatcctccgtaaagaccacttcgcgctccaacagcagttcggccagctccttcaaaccgtcggcatggctgcggagtacctccgccgccatcgcataggcttcggcaatggtatttttagcctcggcgtcgatctgctgggccgtcagttcggaatagggcttggtcagcgccatgtcgctctggcccgtagagtcgtaatagctgatcgtcccgaccttctcgctcataccgtaataagccaccatggcatacgccatcttggtcgcccgctccagatcgttgagcgctccggtcgaaacctcgccgaaattgatctgctcggacacccggccgccgagcatcgcagccagctcgtccatcatctgctcgcgcgtggtgatctgccgttcttcgggcaggtaccaggccgcgcccaacgacttgccacgcggaatgatagtcaccttgatcagcggactggcattctccaaaatccagcttaccgtagcgtgtccggcctcgtgataggcaatcacccgcttctcttcgtcggaaatgatcttgttcttacgctccagaccgccgataatgcggtcgatcgccgccaggaaatcctcgcgcgacacatatttcttattgtgacgggccgcgatcaacgccgcctcgttgcagacattggcgatgtcggcacccgaaaagccgggcgtctgcttggccaggaaagtacggtccagctccggatcgagcttcaacggacgcagatgcacgtcgaaaatctcctcgcgctccttcacgtcgggcaatcccacctcgatctgccggtcgaaacgtccggcacgcatcagcgccttgtccagaatatcgacccggttggtcgccgccaggacgatcacgcccgtattggtctggaaaccgtccatctcggtcagcaactggttgagtgtattctcccgctcgtcattgcccgagaacccggcgttcttgccgcgggcccggccgatggcgtcgatttcgtcgatgaaaagaatacaaggagctttttgcttggcctgctcgaaaaggtcgcgcacgcgcgaagcgcccacgcccacgaacatctccacgaaatccgagccggaaatcgacaggaacggcacattggcctctcccgccaccgccttcgccaacagggttttacccgttcccggagggcctaccagcaacgcgcccttgggaattttcgcaccgatggatttgtatttgtcgggtttcttgaggaaatcgacgatctccatgatctcgacctttgcctcctccagtccggcaacgtccttgaaagtcacctttttcgagttctccttgtcgaacacctgcgcccgggccttccccacgttcataataccgccagcaccgcctccggcaccccgcgacatgcggctcatcaggaagaaccagccgccgataataatgatccagggaagcatctgaagcagaatcgatgtccaggaattctcccggttctcgtacaccagcaccaccttgttacccgactcggccgtcaccttatccaaatcctgacggaacgtatccaccgacccgatattgaaagtaagctgagcccccgtttcgggcatattacggaaacgcgggtccgcagcatccttacggtaccggtccgcagcatccttcttaaggtagatttccgccaggtcacgattgacgacctggattttttcgacgtcgccctgctcgatcatctgcgccacggtattccagtcgctcttgaccgggactccgttgccgggtccgaacatccagtagccgacaataaaaataatgatgacgccgtatatccacatccacgaaggacgcggcatattcattttgttgtttattttctgttgtgccataaaatattattcgtcatactcataacgggtcgccggggcatcggcccacagctcctccaatttgtaaaattcacgcaattctgtctgaaaaatatgcaccaccacatccacgtagtccatagcgatccacagcgcattttgctgtccttccacgcgccagaccttctcgccgagggtttccaatacctgctcctcgatacccgccgcgatcgcagcgacctgcgtggtggagtcggcgttgcaaacgatgaagcaggagcagatcgccccgtcgattttcgaaagatccaacgatacgatatttttacccttcttatcctggattgcacgaattatcgtgcctgtcaatttttccatagtttgaatttaccggtcaatacaactttgcaaaggtagcgaaaatgagggcagaacaaaacaaacccgtttgtttttttatgccgaacgcatcccccttcccgcaaagatacaagagaatatccgaaaatttgctctgcaaatatccgtcccgaatccctattggcgggaaactttcgacaaaatagtatcgatcaaggctttgatgatcgaacttttgacataggtccggcgcacggccacggcgatcttgcgcgaagtagcccccttggccagcgttttgacctgacaacgatgctccgcaggaatgtattccacggccatttcggggataatcgtcacgcaatgcgtgcaatcgacgatccgcatcaacgtatcgagcgaaccggattcgaacgtatagtgcgaggggacctcccgtttggcctggcacagctcgatgatctggtcacgcatacaatgccccggacttaacagcaccagctccttgaggtcgatatcctcgatacggacgttcgtgcgttcaaaaagcggattctcccgggacacgtaaagatggaaccggtcgtcgaacaactcgtgttcctgaatcccctcgccgcaggttccgccggcgaccaatgccgcatcgatccggtcgcggcgcagcgcatcgacgatgtcggcggtcaccatctccgcaatctccagttcgactttgggatagtcccgcacgaaatcgggaataaacttatgcaacaggtaaggtgcgatggtcggaatgacgccgagccgcaaccgaccggaagtttcgcctttgagttccgcgaccgcttcgcggatatgatcgtaagcccggagggtttcccggatttcggcaagcaccacctcgcccgcctcggtcggaatgaccggtttcttgctgcgatcgagcagcaccacgcccaattcttcctccaaagacttgatctgcatgctcaacgacggctgggtcacgaaacagtgttccgctgccagagagaaactgccgcaattggctaccgccagcaggtattcgagttggatgatagtcatagtttatcttatttgcacgcacgaaaatataaaaaaaaccgatacttcgcaattattattcgaccatcggtttagtttttcgtacatttgcagactatttattattagaaactttttaactgatgggaaaaatcatactcaccggagatcgtccgaccggcaaactccacctgggacattacgtaggttcgctgcgccgccgcgtggagttgcagaattcgggcgaattcgagaaaatattcatcatgatcgccgacgcccaggcgctgaccgataatgcggacaacccggaaaaagtgcggcagaacatcctcgaggtcgccctcgactatctctcttgcggactggatcccgcgcaatcgacgctcttcatccagtcgcaggtgccggaactctgcgagctggctttctactacatgaacctggtgaccgtagcccgtctgcagcgcaatccgacggtgaaggccgaaatccagttgcgcggcttcgccgaaggcaacgaagaagagggatcgcagcgccagggtattccggtaggattcttcacctacccgatcagccaggcctcggatatcaccgctttcaaggccacgaccgtaccggtcggcgaggatcaggaaccgatgatcgaacagacgcgcgaaatcgtccataaattcaactccgtatatggagaaacactcgtcatgccgggaattctgctgcccgacaacgcggcctgcctgcgtctgcccggtacggacggcaaggccaagatgtcgaaatcgctgggcaactgcatctacctctccgactcggccgatgaagtgaagaagaaggtgatgggtatgtataccgatcccgaccacctgcgggtgaaggacccgggcaaggtcgagggcaacaccgtcttcacctacctggacgccttcagccgcccggaacattttcagcgatacctgcccgattacgcctcgctcgacgagttgaaggcgcactaccgccggggcgggctgggcgacgtgaaggtcaagaagttcctgatcgccgtgctgaacgaaacgctggagccgatccgcgagcgccgcaagcagtacgaaggccgcatcgaagaggtctatgaaattctgcgcaaaggttcggagcatgcccgggcaacagccgcgcaaacgctcggcgaagtgcgccacgccatgcggatcgactacttcgacgacaaggagctgatcgccgagcaggctcgccaataccagcaacagcgataacgcgcataaccagcagacaaggtacccgaaatgttcaaacgcataacaccgcagacgatcgcggattggggcgaacgtatctacatccgtttcctggagcttaccaaacggttcaccagtacgcagatcatggcgctgctggccatcatcgtaggggttctggccggattgggtacctgcctgttcgaactgctgctctacggaatcaaagcagggctgacccattggttccccgtcgaacagtcgcattttctcttcctgttctatccggtcatcggtatcattctggcctcgcttttcgtcaaatacgtcgtcaaagacaacatttcggaaggcgttacacgcgtgttatatgccatgtcgcgtaaaaactcgtacattgcctcccacaactgctggacttcggtcgtaggcggtgcgacgacgatcggattcggcggttcggtcggtcccgaggccccgatcgtcctgacgggcgcagccatcggttcgaacatcagccgcctggcccacctgaactacaaaaacaccaccctgctgctctgctgcggagccggggcggcccttgcagccatcttcaaagccccgatcacgggcgtggtcttcgtgctcgaaatcctgatgctcgatctcacctcgcgcacggtcgtaccgctgctcatctcttcgatcacggccgccgctgtcgccctcacgatccggggattcgatccgatcatcgccatctcgctgactcccgacgatgcgttccggctcaaccaaattccgcttttcgtcctgctgggtatcttctgcgggctgatgtcctactacttcaccacggtcaatgcccgggtgggcgccttcttcaaaaagatcgacagtccctacaagaagtggctgatcggcggagccgtactcggcatcctgatctacattttcccgcccctctacggcgaaggctacgaaggtttcatgtcgctcatgcacggcaacacgaccgagttgttcaacaactcgctcttctaccgcttcagtcagatcgactgggtggtcattctcttcatcgtaggcacgatgttcttcaaagtgatcgctatggcctcgaccaacgctgcgggcggcgtcggcggtacgttcgccccttcgctgttcgtcggcgcattcatgggcgctatcacggcgctggtctgcaacaccctgttcggatggaacctgtcgctggtttctttcaccctggtaggtatggcgggcgtaatgtcgggcgtgatgaaggcccccctgacctcgatcttcctgatcgccgaactatcgagcggttacggccttttcatcccgctgatgatcaccgcctgcatcgccttcgccatcgactactacctcgatcccgactcgatctataccaagcaactgcgtcagaacggggagttgatcacccacaacaaggacgaatcggtcttcgtctttctgaggctcgacgacctgattcaggacgacggggtttacatccacccgtcccagactttgggcgacatcgtgcagatcatgtcccgggagcgtcacgacgactatttcccggttctcgacaacgaaaaacacctgctgggcatcgtccgcctgaacgacgtgcgggaagacctgttcaatccgcaaaagtacggcaacccgattacacgctacatgctcctgtcccccgacacgatcctgcaacatgaacagatccagagcgtgctgcgccgtttcgacgaaaaccacgtctgggtgttacccgtcgtggacaaggagaaacactacctgggctacatctccaaatcgcgaatcatgaccgcctaccgcgaacaactggtcaagatttcgcaataaaatacagtcccgacctcgctttctacaaccgaagaaactataaaaacagaatagtactatgaattttaattgggctgacgacacgaactgcgccgtaacggtatgcgacaccgaaggcgtggtaatttaccagaacaagcaatctatctccgtcaatggagagtatcgcggcaaaagcatgctcccctgccacaacgagcgctcgaaggggatcatcgcccgcatcctcgaaaaaggcgacacgaatgcctacaccatcgagaaaaaagggatccgcaaaatgatctaccaaacagcctggcgccgcgaggacggcaccgtaggcggtatcatcgaactgtcgatgccgattcccgccgaaatgccgcactacgtacggggataatagagcaccccggaccagaagcatccgaaccactcaacgacaccaggaacttcaaccggaaagccgcaaaaaaatacacgaaacaacccctatccgatacaggagaagagtcaaacgaccgcctttcttccaaaacgttacgaagaggcggatcaaaacggtttacaacactttccacagccgttttccgaaaacaggagcgcccgcgattagtcgcgggcgctcctgtttatttgcttactaccgaaatttctcgaatccgggaagatacttggtcggttcgaactcgacgatcgtataatctgcgatctcatgccggaagaacggatcttcccgcgtaaaggcttcggcttccgcacgattcgcggctttcgaaacgatcacaccgcccgtacggggattctgcggcccggtgcaaagcaatttgccctgagcgaaataacggtcgagaaaagcccaatgctccgccaggtagcgctccacctcttcgagcggcttcttgtaatcgacgataatcagaaacatagtttttcaaagttttatgtcgtaaatctggattacaccgacaagtttgccttggtcgtcggtcaccagcagcgaattgatcttatgctgggtcattttcttctccgcagcgatcagtttctcatcgggcccgatggtcttgggattgggcgtggcgatgtccatggcccggatcgagaaaaactccgattcgcggcgttccatcgcccggcggatatccccgtcggtgacgatccccagcactttgtccccctcgcaaatgacgatcagccccagaccgcctttgctgacggcgtggatcatatccttggccgaacagtccggagctaccacgggcaacccctccttgtgcatcacattgccgacagtcatcagcagacggcggcccaggctgccgcccggatgcagccgcgcgaagtcgatgctcgtgaaattgcgcagcttcatcagcgctacggccatcgcgtcgcccatggcaatctgtgccgtagtcgaagtggtaggcgccaggtgcaggatgcaggcctcgtggcgcacggccacgtcgaggtgcacgtccgaattgcgggccaacgtcgattcgggattgcccgtcatcgaaatcagcttgttgccgttggtatggataaacggcacgatcttgaggatttcatccgtctcgcccgaataagagagcgccagcacggtatcttccggagagatcattcccagatcgccatgaaaagcctcgcccggatgcaggaagaaactcggcgtaccggtgctcgccagcgtcgcggcgatcttgcggccgatcagccccgattttcccattccggtcaccacgagcttgccccggctgtgcaggataagttcgacagcgcacacgaaatcatcgcccagcgtctgttcgagatgcttgagcgccagcgcttcggtatggatcgtctttcgggccagcgagaggatatcggcccgcttgtctgcggtcatattatagcaaagattttattacgttttccaaatcattcagataaagcatgttcggaccgtcactcaaagcatgatcgggatcgggatgcacctcgaagaagaaaccgttggcaccgaacgcccgggctgcccgggccatggcaggcacgaactcgcggttaccgcccgtcttgccgccggcggcaccggggcgctgtacggaatgcgtgcagtccatgacgaccgtcgaagcgataccgagcatatcgggaatgttgcggaaatcgaccaccaggttgttgtagccgtacatattgccacgttcggtaagccaaacctcaccggcaccggccttcatcgccttttcataagggtatcgcatatcttcacccgaaaggaactgcgctttcttgatattgaccgtacgtcccgtacgggccgcagcgaccaacagatcggtctggcggcaaagaaacgccggaatctggatcacatcgacgacttcaccgaccggagcggcctgacaggattcgtgaatgtcggtcagcagccgcagcccccacttcgaccgaacgtcggcgagcatccgaaggcccttttccagccccggcccccggaacgacgaaatcgacgtgcggttggccttgtcgaacgaagccttgaaaatgatttcgacgcccagccggcgattgatgtccgccagcgtcgcagcgaccgtatcgagcaattccgccgattcgatcacgcagggaccggctataaagagaggttttttatccatgattctatcgcttcattcgtttcaaaaattcctcggcggccgccaaatcttcgggcgtgtcgatgccgatggtttccacgtcggaaatacccacgccgatcctgtagccgttctccagccagcgcaactgttcaagcgactcggccttctccagcgaagattgcggcaaggccgtcacctcggcgagcaccttcgtacgaaaggcatacataccgatatgtttatagaaagtatgtttcgccagccactccgaccgctccaccccccgcaggtagggaatcaccgaacgcgaaaagtagatcgcccgcgactcgccgtcgagcactactttcggcgaattgggattttcgagcgccgccagtccgtccgactcggcaaagggccgcaccagggtagcgatgtccgtacccggcacgtcgaagcagcgcatgatcgcccgaagctgttccggacggatgaaaggctcgtcgccctgcacgttgatcacggcgtcgtactcccggccgagctttccataagcctcccagcaacggtcggtgccgctgcggtgctcggccgaagtcatcacggcacgaccgccgaactcctcgacggcacgcaggatccgctcgtcgtcggtcgccacgaccgcatcgggcagcacgccggtcacctgttcatacacccggcggatgacgggctttcccccgagcatcgccagcggcttgcccgggaagcgggtcgatgcatagcgggcgggaatgatcgcaacaaactccataactcgtgactctatctgtttcaagtcgctaaaatacgaaaaaagcgggacattgcgtcccgcttttcaaattaacacggattatttcttctcctcgagagccaaacgcaacacatcctcgttcgtccgcacgtagtggaacgtcagaccgtcgatgtactccgccttgatctccgagatgtccttgcggttgtcttccgaaaggatcagctccttgataccggcacgcttggccgccaggatcttctccttgataccgcctaccggcattacacgtccccgcagggtcgtctctccggtcatggcgatacgctcgcgcaccttgcgccccgtataggtcgaaacgatcgaggtgaccatcgtgatacccgccgaaggaccgtccttgggaatggctccctccggtacgtggatgttgatgtcgttcttctcgaacatttcgggatcgatacccaactccttgtggtgcgccatcacccactcgtgggcgatcgtcgccgactccttcatcacctcgcccaggttacccgtcaggctcactttgcccttgccgggggtcagcaccgactcgatgtagaggatatcgccgccgacctcggtccaagccaggccggtgactacgccgaccatgtccccgacctcgtactcttcgcgcaggaatttcgggatgccgagaatcttctcgacatcggcctgcgtaagctccggcgtataagcctcctcgaaagcgatctgcttggcccggtagcgggcgatcttcgccaggtgcttgtccagcgaacggacacccgactcgcgggtatagcccgcgataacctgctcgacgacctcgggcgtcagcaccaactgcccctcgggaatgccgtgcgccgtcatctgcttgggcagcaagtggtcaaggccgatccgcaccttctcttcgagaatgtagcccggaatgttgatcatctccatacggtcgcgcagcgccgggttgatgttgccgatgttgttggccgtggcgatgaaaagcactttcgaaaggtcgtactccgtatcgaggtagttgtcgtggaacgtcgtattctgttcaggatcgagcacttcgagcagcgcactcgacgggtcgccgtgattgcttacggtcaccttgtccacctcgtcgaggatgatgaccggattggacgacccgcagcgtttgatggtctggatgatccggcccggcatcgccccgatgtaggtgcggcggtgaccgcgtatctcggcctcgtcgtgcagaccgcccagcgaaatacggccgaacttacgtcccagcgccgccgccacggacttgcccagcgaggtcttgcctacgcccggagggccgtacagacagaggatcggggatttcaagtcgcctttcagcttgatgacggccaaatgctccaacagacgctctttcacttcgtccagcccgaaatggtcgtggtcgagctgctcgcgtgcgcatttcagatcgagattatcctgcgtcacatcgttccagggcagctcgagcatcagttgcagataggtaacttgcaccgaatattcggccacggcgggattgagccgttcgagcttggtgatctccttctcgaaaagttcggccacctccttgggccagttcttcttggacgccttctcgcgcaatccctccagctcgctgtcggcaccttcgcccagctcgtcctgaatcgtgcgcatctgctgctgcaggtagtaatcgcgctgctgcttgtcgatctcctgcttgacacggctctggatctcgttcttcagctcgacgagctgctgctcgcgcaccagaatctccaacaacttgcgggcacgggccagcagaccgggagactccagcagcgactggcggtcttcgtccgaaagctcgaggttcgaacagatgaagttgatgattccccgcttggagtcgatattcttgatggcgaacgccgcctccttgggcatgtccggcgaaatagcgatgatacccagcgcaatgtcgcggatcgaatccacgagagcctcgaactccaggctctttacatcgggagaagagtcgcgcaacggcgtcacgctggcctggaaataaggttccgtggagacatactccttcacctcgattttctccagtccgttcagaatcaccgtcaggttaccgttgggcatctccagaatcttgataatacgggccgcagtgccgaccttatacatatcgtccggcgccgggtcttcgacttcgctttcgcgttgcagcacggcccccagcaatccgttgcgctcgttcacttcgcgcaccagccggatgctcttctctcggccgaccgtaatcggcgtgatcgctccgggaaacagcaccgaactgcgcaaggtcaatatcggcaatatttcgggcacgttgacctcttccaacacctcgtccccgcccgttacgatgggaatgacgtgatggcgtccgtccaggacatcgggcagtgccttcagatcgtccatgtcgatgttttttattttatccttcttactcatatttttctcttttaccgaaaacaggtgcagccccgtacgtcgaacggatttcctttcggaaaattccgtttctcccgcctccctacagtttctcctttcctcaatcggggaagtttttaagtacagcgggcacctatttcttaaaaaatttacagattttgcaaagataacgattttcctcctaattttatttcatattaacagaatgttcataactttgcaaatcctgtacaaattataaatatcccacataatatgatgcaaatcgccgacaaatacgccccgcagcagatcgaatccaaatggtacgactactggatggagcaccgccttttccattccgaacccgatgaacgggaaccctatacgatcgtcatcccgccacccaacgtcacgggtatgctccacatgggacatatgctcaacaacacgttgcaggacgtactggtgcgccgcgcccgcatgcagggcaagaacgcctgctgggttccgggcaccgaccacgcctcgatcgccacggaagccaaggtggtggccaagctcaaggccgaggggatcgagaaatcgtcgctctcgcgcgaagagttcctgcgtcatgcctgggactggaaagagaaatacggcggcgtgatcctgcaacaactgcgcaagctgggcgcctcgtgcgactgggaacgcacctgcttcacgatggacgaagctcgtaccgaaagcgtcctgcgggtcttctgcgacctctacgaaaaggggttgatttaccggggcgtacgcatggtcaattgggacccgtcggcccagaccgccctttcggacgaagaggtggtgttcaaagagtcgcacggcaagctctactacctgcgctaccgggtcgaaggcaccgaccgcacgatcatcgtcgccacgacccggcccgaaacgatcctcggcgacacggccctctgcgtcaatcccgacgacgaacgctacgcctggctgcccgaagacgcccgggtcatcgtcccgctggtgggccggtcggtgcccgtgatccgcgatacgtacgtggacatcgctttcggcacgggtgccctgaaggttactccggcgcacgacgtgaacgactatatgctcggtgaaaaatacgggctcgaatcgatcgacatcttcaacgacgacggcacgatcaacgacaaggtagggctgtacgccggtatggaacgcttcgccctgcgcaaacagatcgaaaaggatctcgacgcagccggcctgctggagaaaaccgaagactacaccaataacgtaggttattccgaacgtaccggcgtagcgatcgagcccaagctctcgatgcagtggtttctctcgatggagaaactcgccggtccggcgacgcaggccgtcttggaaaatgaaatcaagctcgttcccgaaaaatacaagaacacctaccgtcactggatggaaaatatcaaggactggtgcatctcgcgccagctctggtggggccagcgcattccggcctggtatctgccccaaggcggttacgtagtggccctcaacgcagacgaggcactggagaaagcccgggccaagagcggcgacgcctcgctgacgctcgccgatctgcggcaggatgaggacgtgctcgacacctggttctcgtcgtggctgtggcccatctcggtattcgacggcatccgccacccgaacaacaaagacatcgaatactactacccgaccaacgatctggtgaccggtcccgacatcatcttcttctgggtggcccgtatgatcatggccggttacgaataccggggtgagaagcccttcggtcacgtctacttcacggggatcgtgcgcgataaaatcggccgcaagatgtccaaacaactcggcaactcgcccgatccgctcgacctgatcgcccagttcggcgccgacggcatgcgcgtagcgatgctgttgagctcctcggcgggcaacgacgtaatgttcgacgaggctctctgcgaacagggacgcaatttcggcaacaaaatctggaatgcctaccgactggtcaacggctggacgatcgacgacgccctggcgcaaagcgaaaacaaccgcctggcaatcgaatggttccgtcaagcgctcgccaagacgctgcgtcaggtcgaatcggacttcgcctcctaccgtatctcggaagccttcatgaatctgtacaaactcttctgggacgacttcagcggctggtacctcgaaatgatcaaaccggcctaccaatgcccgatcgaccggccgacgctggaagccacgtgcggtttcttcgacgacctgctgcgtctgctgcaccccttcatgccgttcgtcaccgaagagatctggcaggacctggcaccccgcaaggcaggcgagtcgatcatggtccagcgtatgcccgaagcacgggagatcgacgaggcgctgctgggccggttcgaactgacgaaagaggtcgtaacggccgtccgcaacgtccgcaagcagaaaaacattccgcagaaagaccccctgacgctccgggtgatcgccgatgaaaactacccggcggaatacgctcccgtcctgcagaaaatgggcaacctctcgcagatcgaaaccacccgggagaaagatccttcggccgtcggattcctcgtaaagaccacgcaatacttcgtaccgatggagggcatgatcgacatcgaggccgaacgcaaaaaactcgcaggcgaactggaatacctcgaaggattcctcgccagcgtacaaaagaagctctcgaacgaaaggttcgtttcgtcggctcccgagaaagtcgtggccaacgaacggaccaaacaggccgacaccgaagccaagatcgccgcgcttcgggaacaactggccgccttgaaataactcatcacgaaacattcaactcctctctccggcttacaacagcagagagaggagtttatacccgactatgccggaaatcaccatctataccgacggctcggccctgggcaatcccggtccgggtggttacggagcggtcctgatatcgggacggttccgcaaggaggtgtcgcagggttaccgcctgacgaccaacaaccgcatggagctgctggccgtctgcgtagccctcgaaatgctgaaattcgaaggcagcgacgtgacgatctactccgattcgaaatacgtggtcgatgccgtggagaaacgctgggtattcggctgggagaagaaagggttcgccggcaagaagaaccccgatctatggtcccgcttcctgcactcctaccgccgtcacaacgtccgtttcgtctgggtcaagggtcatgccgatacggtcgaaaacaaccgctgcgaccaactggccgtagccgcagccaacgacagggcgcacctgctggaagataccgggtatgttccgggcaatggagagtaagccatataatagcataaaaaaccccgaaacacgacgaaatatcccgggactttcttaaaaactatccggtcacacggccgtccgaactcggaacggcattcctccactcacctcctgcccctatctctttaacttacttccgcacataagctcgctcgatctccgcgatatagacctcgtgataatcgtgctggggataccatttcgtatcgcacctgcgatcgacgaactcttcgggccggatctttccgacatagagcttgcggcattgcaggatcaggcgtgcttcggccggcgcaggcactccgtcgtccgtacaggcgaccgtcagtccggcattgcggatcttatcctccgtacggccggtacgactgccgcaatattcgagagccgcatggtactcaggtgagaaaaacgagagggtcacccgctcctcgcgatcgacgaattcccgcgtataacgctgcggacgtatcacgaactgtgccacaggacgtccccagatgaagccgatcataccccaactggcggtcatcgcattgcaactttctccgttcccggccgtgatgagcatccactcccggccgatggcccggataaaattatcggtaatttcagcgggatcgatctgtttgaaattttccataatctatttgttcctttttgtgattccaacctgttacaaaaataacattcttttcctaaaatcggatcgccggattgcacatcctgattaatttgctatatttgcccctactttaccccgaaacaataaccgatccggaatctatgttcaaaacatacatgcgcctgctgggattcgtcagcccgatctcgaaatacgccgttccctacttcttttacgcgctgctgtacgccctgttcaacacgctcacctacgccatgatcctcccgatcatggacacgttgttcgacgacaagaactcctatgtcttccaacccgtttacgactttcccgtgcacgggctctcgttctcggatatcgacgcctcgcagatgttgagctacgtctatacgcaactgttcgggacggatttcacgatgtcgaaaatgcttctcctgctcgcctgcggtacgatcgtaatgaacctgttgagcaatttcttccgctacatgagcgcctggacggtcgaaaacatgcgcgtcagatcgctgcaacgcatgcgcaacgatctgttcaacaaaataatggggatgaacgccggatatttcagcgatcagcgcaagggcgatctcatgtcgcgcatcacgcaggatgtcatggtggttcaatactgcatcaccaacacgctgcaagtcgccttccgcgatccgctgcttattatcggttacgtgatctacatgctcctcgtatcgtggcagttgtccctgttcgccatcctgttcctgcccgtagtggcgctcattatcggacggatcgtcaaaaaactgcgccacccggccctcaaagggcaggaacgcatgggcgacatggtaagcgtgctcgacgaatcgctttcaggcatcaaggtcatcaaaagttacaacgccaccgactatatccgccgcaaattctccgagttcaacgccgaattttcgcgcctgatgctctcgatggcccgccgtcagcaactggcttcgccgatgagcgaatttctcggcctgacggccgtcgcggtactgatcgttttcggcggttcgctcgtcatgaacggatcgctttcggccggcggattcgtcggcttcatcgccgtattctcgcaaatcacccgccccgtgcgctcgttcatcgaccagttcgccaatatcaaccagggtatcgctgcgggtgaacgcatcttcgacgtgctcgattccgaaccggaaatccaggacaaacccgacgccaagacgttggacggcctgcacgagaagatcgaattccgcaatgtacacttctcctacgacggcagccgggaggtgatcgacggcatctcgttcgacatccgtcggggagaaaccgtggctctggtcggtccttcgggcggcggcaaatccaccctcagcgaactgatcccccgcttctacgacactacgggcggcgacatcctgatcgacggggtttcgatccgtgactacacgcaggagagcctgcgtgcccacatgagcatcgttgcgcaagataccgtgctgttcaacgacaccatcgaaaacaacatcgccatgggacgccggggagcgacgcacgaagagatcgtcgctgcggccaaaatcgccaacgcccacgacttcatcatggagtgtccgtcgggctacgacaccaacatcggcgaccggggcgccaaactatcgggcggtcagcgccagcgcctgagcatcgcccgagccgtactcaagaaccccgaaatcctgattctggacgaagcgacttcggccctcgacaccgaaagcgaaaagctcgtccaggacgcacttaactccctgttgcaaggccgcacttcgatcgtaatcgcccaccgcctttcgaccatccacaacgccgacaaaatcatcgtcatcgaacggggtcggatcgccgagcaaggcactcacccggagttgatggctaaaaacggcatctacgccaagctgatcgagatgcagagcttcgattaaaagccgattcccatgaccgaaaaggagaaaatgctggccggagagtggtttcatcccaacgacgcggaactcgaacaggaccgcaccagggcccgccacctcacccatcggctcaacgtcacactcaaagacaaggacgcgacctatctggcgacgctccgggaactctgtccgggggtcgaagccatgatccgcgcccctttctactgcgattacggttacaacatctccatcggcaaagggtcctacgtcaatttcaactgcgtctttctcgacctcgggccgattcgcctgggacaacgctgtctgataggtcccggcgtacagcttctgacggccgtgcatccgatggacgccacggaacgggctacgggcaaagaaaaaggagcgggcatcgagatcggcgacgactgctggctgggcggcggcgtgatcgtctgtcccggcgtcaagataggctgccgctgcgtcatcggcgccggcagcgtggtcacgcacgacattcccgacaattcggtcgctgcaggcaatccggcccgcgttatccgcaccgcaaccgacgaataaatccgccgcttcggaaaatcgctctcggaatcctgcaacagcttccgccacaacccgttgtctgcatacaaaaaactgctatccgagatctatttattcgcattttttcataactttgcatgttggtaaaatccgccgccggcttcccgcacgaaacaggcggcacacagcgaattccggcgctgccgaatacgacaaagacaggtaacagctccgcattcggggctgtccggcggaatcgggccggatcggattctgccagcccatgaaaacgacgattgaaaacaacaggatatgaagttcaaagaatataaaggcctcgatctgccggggttggccgccgacgtactgaaagagtgggacgcacaggacacgttccacaaaagcatctccacccgcgagggtcatcccaccttcgtcttttacgaaggacctccctcagccaacggcacgccgggcatccatcacgtcatggcccgcacgatcaaggatatcttctgccgttacaagacgcagcaaggttacctcgttcaccgcaaggccggatgggacacgcacggactgcctgtagagttaggcgtcgaaaagaaactcggcatcaccaaggaggacatcgggcgcacaatctccatagaggagtacaaccgcgcctgccgcgaggcggtgatggagtacacgggcctgtgggaagaactcacgcgcaaaatgggttattgggtcaatatggacgacccctacatcacttacgacaacaaatacatcgaaaccctctggtggcttctgaaacagctcttcgacaaggggctactctacaaaggttacaccatccagccctactcgccggccgccggcacgggactttcgacccacgagctgaaccagccgggctgctaccgcgacgtgaaggataccacctgcacggcgcagttcaaaatcatccgcgacgagcggagcgaaaaactcttcgacggagccgaaggcgatctctacttcctggcttggaccaccacgccctggacactgccgtcgaataccgcgctggccgtaggccccgaaatcgaatacgtgcgcgtcaaatgccgcaatccctatacggatgccccccagactgtcatcctggccaaagaactgctggggtcgtattttacccccaagatggagggcaagttcgaaatctctccggtcacctacaagggtccggacttcgaaggcatccgctacgaacagctcatcccctgggtgaagcctgcgggcgatgcgttccgcgtcatcctgggcgactacgtgaccacctccgacggtacgggtatcgtgcatatcgccccgacgttcggtgcggacgacgaccgcgtggcccgcgccgcaggcatcgccccgctgtttatggtcgataaggcgggcaagaatcagccgatggtcgatcgcaagggacggttcttcctgctcgaagagctcgacccgaccttcatacgcgacaacgtcgatacagcggcctattcccaatgggcgggccgttacgtgaaaaacgcctacgacgattcgctcgccgccgacgcgccgacgctcgacgtcgatctctcagtgatgctcaaggccgagaacaaggttttcaagatcgaaaagcacacccactcctacccccactgctggcgtacggacaaaccggtgctctactacccgctcgactcctggttcatccgaactacggcgctgcgcgaccggatgatcgaactcaacaagacgatccgctggaagccggaatcgaccggaacgggacgcttcggcaagtggctcgaaggtctggtggactggaacctctcgcgctcgcgcttctggggcacgccgctgccgatctgggctacggaggattactcggaaatgaagtgcatcggctcggtcgaagagctcgtcgccgaaatcgaaaaatccgtcgcggcaagtctgatgaaggagaatccctacaagaacttcaagccgggcgacctctccaaagagaactactcgaccgaccggatcgacctgcaccgtccttacgtggacaatatcgtgctggtttcgtccaaaggcgaaccgatgcggcgcgaaccggatctgatcgacgtgtggttcgactcgggcgccatgccttatgcccagctacactaccccttcgagcacggcggcgactacttcaagagcgtctatccggccgatttcatcgccgaaggcgtcgatcagacgcgcggatggttcttcacgctgcatgccatcgccacgatgctcttcgactcggtagctttcaagaacatcatttcgaacggcctggtgcttgacaagaacggcaacaagatgtccaaacgtctgggtaatgccgtggatcccttcgaaatactttcgacctacggcgccgacgcgacgcgttggtatatgatctccaactcgcagccctgggacaacctcaagttcgaccgggacggggtggacgaagtgcgccgcaagttcttcggcacgctctacaacacctactcgttcttcgccctctacgccaatgtggacggttttacgggacaggagccggaagttccgatgagcgaacgcccggagatcgaccgctggatcatctccctgctcaatacgctggtccggaacgtcaccgaatcgctcgaaaattacgatccgacgccggcggcccgtatgatccaggaattcgtatgcgaaaacctgtcgaactggtacgtgcgcctcaaccgcaagcggttctggggcggcgggctgacacgcgacaaactggccgcttaccagacactctacacctgtctggaaaccgtttcgatgctctccgcaccgttcgcgccgttcatctccgaccgtatcttccgcgatctaaacgccgtaagcggtcgccacacggacgagtcggtacatctttcgaccttccccgtctgcgactcctcgctcatcgacggtgaattggagcagatgatgtctatggcccaacaggtttcgtcgatggtactggccctgcgccgcaaggtgaacatcaaagtccgccagccactcacgaagatactcattccggtcctcgacgccgacaccgcacgccgcatcgaagccgtcaaggggctcattatgagcgaagtgaatgtcaaggaaatagaactgatcgaaaatacgacgggactcatcaccaagcgcatcaagcccaacttcaagaccctcggtcccaaatacggcaaacagatgaagcagatcgcagctctcgtagccgggttctcacaggatcagatagccgcgatcgaagcatcggcggaaaccctgctggacatggacggcgaaaaaatcaccgtcacccctgccgatttcgaaatcacctcggaagatatgccgggctggctcgtagctacggagggcaagctgaccgtagccctcgatatcacgatcaccgacgacctgcgtgccgaaggtatcgcccgcgagctgatcaaccgtatccagaacatccgcaaggattcgggcttcgaggtgacggacaaaatccgcgtggagatcgaacagcaagagttcgtccttcccgcgctcaaatctttcgccgactacatcgcctcgcagacgctggctgtcgaaatcgaaggagtgccttctcccagcggcgaatttgtcgtggagtcggaggtagatgagcaaccggtccgtatcgcggtaaccaaaatctgaccgaaaaaaggagaacctgcacgtttccggcaaaaaatttggaagtaacgggaatattgtttaatttagtataacattattacaaataaaatattgaaactatggcagaagcagaaaaaacccgatacagtgacgccgaattggaagagttcaaacagctcattctcaaaaaactggaaacagcacgtgcggattacgaactcctgcgcgccacgataacccacaccgcatcgaacgatacggaggatacctcgccgacgttcaaggtgctggaggagggagccactacgctctccaaagaggagagcggccgcctggcggcccatcaaatgaaattcatccgcaacctcgaaatggcactcgtacgcatcgagaacaagacatacggcatctgcaaaaccaccggcaagctgatccccaaggagcggctgatgaaagtgcctcacgcaaccgagtgcatcgaggccaaagaaggacggattcactaaaggattcaccctccgaacgaatgttcttttcgtatggtatgaaaagaatccgttcgccacgaccggagataaaaataggagcgtcccagataggacgctcctatttttataaaaaacatcccgcaactaagtgcggctgcaggatgcttccctgacggaacaataacacttatgaattggaacttctctatattcattcgccggccacgccgctccgattttttttcgtcgtgatctcgatcacccctttcgctcccttctcgccataatgttcgaccgcctgctctcctttcaataccgtcatcgcgtcgattcgggagggatccagttgcgaaaggcgatcggcagaaatttcctcgccatccaatactattaaaccgacctgcttcagagagccattctcaatcgaaaccgaatccactccagccgtataagtcgccaccgtaacttcctccaaaggctgcgccgacgtagcaatagacttagacacggaagagtgccccgaggaggcgccggaaggctccctgacgactgtcatcttattgcgtttgcccgatgcatccgacgaataaacagccaaagtcgtacgttctccggattcattcgtcccaaactcgatcacaccgtcccacgcccgctcgccataacggtccaacaattcaaaaccgggttgcagaatccgaacccacagaaccttccccgcatcgatcgacttcaaataatcatcatcgacctgccggccgttgatcaacacaagcggtcgggctccattgagcggacggatcgcaaatccgtttcccgtatccttgatccgataaaaaccaggaccttcctggaaagagtttccatgctcaaaactacactccaaacggccgaactgccgggcaccttcggtcgtcgtcacataaaccacgccatccgccgccgcctcgccgtaacgttcgacagcccattcatccttcaagaccgacatcgattcgatctccgcttcattcaaagcctttacctcggcaactgcgactcttctgccatcgagcaggaagagcatcgaactcaaatcgtgaccggaaaccacgagcgaatcgttcggcacagcaacttcggaaatccgcaccttgacctgcccgtccaccggagtattaccggtctgaaccgtaccgaacgacggtccctccggtacggatgcgacgacagattcacctgcaccggacttccgggcctctttttcggccagtttcgcagcatcacgagtcgtcacaagaatcgctccgacacgggcggcatccccgtaacgcttgactaatgccgggttgtgaaatacatcctcactggagaaaatctgtatggtttcgatcttgcgggcaggaatcttctccagatcggtgatggaccccacacgcccgtccacagctaccaacggcaacattccgggacgtactccctgcacgttccgcaatttcaatccgctcaccttataggtatttttaccatccaccgatcggaaactacccttcagataacgcatcggattgttgtatttatcataaacggtcacctcgaaatcatcctcacgcgaagccgttttggaaacgacctcgatcaccccgttccgggccgatacgccgtatctggcgaccgtcgcttcgtccggctcggttacgatccgaacggtttctatctcgtgaacgataccgggagtagtaaaaaggtagatattcgacaccttgccattccacagtaccaatggccggaattcgaacggcatcgaatggcttaactcgatccgctgcacccggtaagtatcgggcacacccgtcggttcgaaatcgcccgtaatatagtgatacaaatcggaaggcttctgtttctcttcgattgtcacacgttccgactccggacgactcgtatagacgatcgcaccgtaacgaccccgatcgccgtagcgtctgcgtgcctcgccggaggtcatttgggtagccgtggcgatactcgacggggatatcgcgcccaactgtctgtaatcgatctcctcaccgtcaagcagatacaagccctcgtccgacagatcaatccaaaaaggaatgagggcagccccatcgctcacctcgacagtcacccactcttccgcaccatcgaccgatttatacccgagtcgttcgagtttcccggcatcagcagtcagcaacttggcaaactcctctttcatgtacgcatcgcggcgggcgacaaactgttctggcaactcatccccttcccacaccaggtaaagctccaaatcctccggatcccacagcgatggatcggccgaactccaagactgcgtataaggataaatctgaaccccgatcgacaacactccgttcgccgcccgcgtaccgtatcccttcagtgcctccggccctttgaccatccaggcaccaatcatcttctgttccggcagccccaaataagtatccagcgtttcagccgacaactcctcgcccccgtccattatcagaggcggatgtttcggatcgaaacggaaatctgccggatcgccataaaccgcatacactaccggctcatcggatacgggcagatgggtcagagcaaccgactctttcaaatgaaattccaaggcaatgtccgtttccatcggaattccgaagcggctaccgactgattttactttccgatccgtctcccctccgacaaggtaacacacgatcggcttctccgaaacgatcgtaaagcggccctccgcgtcggtcacaacccgccggccgccgctgcaaataaactcataaccggcccaaggcttatcgtcccggccaaatacgcgtccggtaaaggtgtgcgcccccgattctgccgtttgcttttcaagagcggtacgctcgagattagccagcaattcggccatggagccttcgaccggtggcattcccccttccggtgtaccgaccatacggtcgtccgcaccagcaggaagaggcatttcaccgtttccggaatttttcgtagttttgtcctccggaaggacataggaggtctgtgcgaaagtgccgagcgccaggcacgcaagcggcaggacatagagcgccttggccctggcccacctcgatgatcgtttacgcaacatcatggtaattcggtttttaaggttactatgattaaggctgttggcaattgagtaccacctcccgccaacggccttttttatcaacagcatctgataatctttcgcatcgaccccgcagcggagcacctgctcgtcggcctcgtactcgtgcacggcacgcagttccacacgcaacagccacatcgcggggttgaaccactgcaaacaccccagcaaatcgaccagcagcaggtcccacgaatggcccaaccgttgatgcgcctgttcatgcacgaggatcgttcctccgccgcaggcataatcctcctcggacatcaccacatatttcatccaactgaacggagctcgaatccggttcgacaacaccaatacgctcccgtttccgagcggtatgcgccggccgcggcgcgtcattcgcacaacccatacgatgttgcatacggtccatcccaacgtcgcaaatatccctgcaaaatagatgattccgagcaaaacgccccagtcgaacggttcgggagcaggctccggctcctctattatcatcaggtcccgggtatcgtcggggattcggttttcgaataccatgtcccgccggaaataactttccggaatcacgtcgatcccagcggtggataccccgggcaactccttctcgacggtaattacgcacaaaggcagcaaaaacgacagcagcaacactccgcacaacaacaccctgttcatccgatgcagcgtatcgcggctcaacaacaacttgtaaaacaggtaaaaaaccgccaggcatcccgcagccttcagactgtaaagcagaaaggtcggcataggactatcgtttttcggtttgactttcgatttgccggatcagctcgcgcagatcgtccacggagattttctcctcccgtacgagcgacgaaaccaccccgaggtaggaattgtcgaaatacttgctcaccacgcccttcagcgtcttgcggctgaactcctcctcgctgacgagcggataatactggtaggtgccgccataggccttgtgtccgacgtaccctttcgcctcgaggccacgcaccatcgtcgataacgtattgaaatgaggtttcggttcgggccagagcgcaaccagctcgcgcacgaacaacgggccccgcgtccagaaacaacgcatcagctcctcttctctgggtgtcagcttttccatagtcgatgtcggttaaagtcgaacgaaacaggacctgcacaaacggcagcacagctccgcattgccggctcctgcacaaaaatcttctgaaacaaagataactaaaaaaatttcacatacaactattttttatagttttcaaactaaaaaatttagttttgcaggaaaaacagagagcaacccgctgtaaaacaacaaaaaaataatagacaagataaaaaattcttgtctattatcagaattaagatatggaaaaatcttcctattcctcgtcgcggtgcagcttctctacgtaaatggcatgctgcatggcgatacgcttcgcaaccgaaggtttggtgaaatactggcgacgacgaagctccttcagaacacccgtacgctcgtatttacgtttgaatttcttgagggccttctcgatgttctcgccctcttttaccggcatgataatcataattcgttgctttttttattgttttttactctaatttctaatggatcgtgtcttgtatcggggcgggactccatccggacgacgccgactccccgttcggtatgtctttcgaggcttctcgtaccgtaaaccgaagatacggggccaatcgctcggcctcacgcggggttaatatgtgctcttcaaccaactcttcgacggtactccaacctcctttcaattgtcttttactaaataacttcctaaatacggcgggcggcaaataaggatgccccttgagcgtactcggaggtgcaaagttaatatcaatttttcgaattttgaaactatcgcagtaaatttgtttcacgatccgctcgaaattggactccgtgacctgcggaacctcggccaactgatccacgctgtaaaatccgccgagccgctccctgtatcgaataatggccatgacgctcttctcaccgatcccgactaccgagcgtaaggtcgccgaatcggccccgttgagctcgatcaatccggagcgaacgggctccggtttcggaaaaattacataggggagcaaaagatcggccaccgaatcagcgatcatatagcaagcccgaaaacccgcttcgtcccgaagaccttcgtaaagatcccgataacggacaatggcctcggcctgacggacggaaaaaccgagcgacgcgagataggatgcggacaccgtatcgatcctgaatcgttcgcggggcacgatcctcctcggctcctgcgggacatactcccgatattcccgacgcggagaaggtgtcagcgcatactcgcgtccgatccgaatatagggttccagaataaaatagaccgaatcggtcatgccgtagcaggtagccacatcctcggggatccgaaacaccttgcccgctgcgcggtacttcagcaggctgaccgccatgcgggacgagagtcccagccgccgcagatcggcatactccaccgtattgggatcgaactcgaacagcctcacggagtccgccgcaaccgtcgcttccatctccgcctccaccctgtcggcggataccgcgctcttccgccgttcggccaggagcagcccggcaacgaacactcccgccagcaggagaaacaccacgagcgcccggcgctcacgcatctggaaaaatccggccatcctctaccacgcagctttgtcggacaacaacaacgcccggtaacggtcggaaggcgactcgagccgctcacccaaaccatattccacccaacgttcgtccaccttccgaacgacctcgggcagcgaagtcaccacattgggaaaacgcgaagggttgcccgcaattccgggccgcttgctccgggcatccgcgcacagcacaccgtcgcggcactccacatcccgccggggatcggtattggccgcagcgagccacagcagctcgtccgggcgcagcgtccgggcgtgtccgtcgaaaagaacgacatagcgaatcccccggcacggatttcgggcaaggaaagcggccagatccggcttctgttccaccgtatcgtcggcaaagagcagcaaggccccccacttcccggcaagtccgtccgcgacctcgaccagaccgggcgtcagctcgaaccgctccggaagccgaacggcctccgctggagcggacggatcgatctccgtcaggtcgaacgccagtttaccgccgaacccgggcgtcgcggtcgcatggtcgagtacgtcgtaaactccctcgcttacaatcaaatcgcgcgggaactcggcccggcgcaacaaggcggccaaccggtccggatcatgcacgtcgcaatcctcgcccgtaatgacgaggtatttattgaacatcatctgcccggccccccaaagtccctgcgctactttatgggcttgtccccggtagcgtctgtcgatcgacaccacggccaaattgtgcgccgtaccgaaaacaggcatcgtcagctccttcacttcgggctgtacggccagccggatcggagccaggaaaatcttctcggtggccttggcgatataggcgtcctcctgcggaggaatgcccaccagcgtcgcaggataaacggcatcgcgccgccgcgtgacggccgtcacatggaagcggggatattcatcggtcagcgagtaaaaacccgtatggtcgccgaaaggcccttccaccgtcttcggctccgacggatcgacatacccttcgatcacgaaatcgcagtcggccggcacataaatatcgttggtgatacacttcaccagtttcaccgggcgccggcgcagaaaccctgccagcaggtattcgtccatgttgtccggcatcggagccgtcgcagcataagtataagccggatcgccgcccagcgctaccgacacgggcattcgccgcccggcacgcctgtaaccttcgtaatgacgggctccggtcttgtgcaggtgccagtgcatgcccgtcgtgcgggcatcaaacagttgcagccggtacatgcccacgttgcggattcccgtttcgggatcgagggtgtgcaccagcggcagcgtcacgaagcgtccgccgtcgcacggccagcacttgagcaccggcagcgcatcgagcgacgcctcctccccctgcagcacgacctgctgacattcgccccgcgacgacgaggtacgcggcaaccagcgcgacatctcggccagcaaaggcagcatccgcaatttatccaggagcgaatttttcggcgtgacggcctgctgcaacaaatcatcgagccgtcgcgtcagttcgtcgagcgactccacgccgagcgccatcgccatccgacggtcggaacccatcatattggtcagcacgggaaacggcgtccccgtctgctcgaacaacagcgccttgccgccgtccggctgcttggacatgcggtcggtaatctcggcgatctcatacaccggatccaccggcacgctcacgcgctgcaattcgccttcccgctccaggcgggcgataaattcactcaggttgcgatacataaatccttacattgattctgctccgaagttttcgaggcatacaaagttaaaaaataatccggcgaatccgccggattatcccgattatcgttcccgcccgcagaagcggcaagccgaagcaactaccgcaggaacagcagctcccggtacttgggcagcggccacatctggtcgtccacgatctcctccaggcgatccacgtgtttgcggatctggtcgaaatagaccgccaccgtatcgtggtacgcgagcgccttctcccgctgatcctcgatcttgttggccaccttgcgggcttcgatcatatcgtgggtcagttgctggatcagagccgtatgctgctgaatacgtttgatgagttcgacatcggccgaagcgtccaggccctgtccgatctgcaaaatcttatagaccttatccagcaggagggcttcgtaacgcgaagcgatcgggacgatatggttcatcgtcagatcgcccaacacgcggccttcgatctggatcttcttgatataggtctcccatttcacttccgtacgggcttcgagttccaccttcgataatacacccatacgggcgaacatctcgaccgacgaaggatcgaggtagcggtcgaatacacgcggcgcacaggtttcgcaatcgagcccccggcgtgccgcttcggcccgccactcctccgaatagccgttgccgtcgaaacggatcgcccgcgaagagcggatcatactcttgagctcctcgtaaatcgccttttccttcctgactccggcctcgatacgcgcatccacgcgctcgcggaacgccgtaaactcgtccgccactgcggtattgagcacgatcatcgcctcggcgcaattgtccgaagaaccgacggcacgcaactcgaaacggttgccggtaaaggcgaaagccgaagtgcggttgcggtcggtattgtcccgcaacaaagccggaatatgcgaaatgccgctcatcttgaaaacgttcttggcattgaagcggatcgccgaatcgctgcggctggcctcgagtttatccagcacggccgaaacctgcgtaccgaggaaggtcgaaataatcgccggaggcgcttcgttggcccccaggcggtgggagttggtggcgctcatgatggccgccttcagcaggccgttatgcttgtgcacggccgaaatcacattcaccaggaaggtaatgaactgcaaattctccgatgcggttttacccggactgagcagattgacgcccgtatcggttcccagcgaccagttgttgtgtttgcccgaaccgttgattcccttgaaaggtttttcatgcagcaacacccggaaattatgacggcgggcgatcttgtccatgatggtcatcaacagctggttgtggtcgttggccaggttgcactcctcgtacacgggagccagttcgaactgattgggtgccacctcgttgtgacgggtcttgaccggaatgcccagcttcaggcattcgtattcgagatcggccatgaaagcgatgacccgcgtggggatcgcgccgaaatagtgatcttccaactgctggttcttggccgattcatgccccatgagcgtacggcccgtcagcatcaggtcgggacgcacggcccaaagactttcgtccaccaggaaatattcctgctcccaacccaaatactgaatcacccggttcacctccttgtcgaaatagcggcacacctcggtcgcagccttgttcacggccgaaatcgaccgcagcagaggcactttataatcgagcgcctcgcccgtataggcaatgaagacggtcggaatacagagcgtaccgcccacgatgaaggccggcgaggtagggtcccacgccgaataaccgcgtgcctcgaacgtattgcggataccgccgttcggaaacgacgaagcgtcgggctcctgctggacaagtaccttgccggaaaattcgtcgagcacacccccgcagccgtccggctcggcaaaggcgtcgtgcttctcggccgtaccgcccgtgagaggctgaaaccaatgcgtatagtggtcggcaccgtggtcgagcgcccactggcgcattccggcagccacgccgtcggcgacttcgagcgtcagcggcgtcccccgctgcatcgtatcgagcagttgggcataaaccgtcttgttgagataccggcgcatggcctcgcggccgaataccttcgtaccgaaatactcggaaggacttccctcgggagccttcacttcgacggctttgtgattgatggccgcctccaccattttgaatcggagcaatgacatggaatcaattcgaattatgaactcggaataccgtaaaacccgtacatttccgcccggatgacggacggcatcctttctgcgtacaaagataaatattcgacacgacaaaaacgtacaaaaaaccgcatctcccagaaaaaaatcgaatatttttcgaaaaaactaataaaaaaacaacttttcccgaaaaaacagcctgaaaattcgtcataccggtcgatttcagacattattttccggaaaatagcattttttcaaaaaatcgtcccattcatgatccgggcatttccaaaacctccgccgaaaagagccttcgttgatacaaaccggctattttccgcatttcttgcttacaatccggcaattattttatatctttacgggcagtttaaaagcaattgaacatatttcaatactaatctctaatttattatggcaactaccaaacgtgaaaagttgtttaccgaatttccgccggtttcgaccgagcagtgggaggaggtaatcaaggccgacctcaaaggtgcggactacgagcgtaaattggtgtggaaaacgccggaaggtttcaacgtccgtccctactaccgggctgaaaacctcgccggactgaagttcctcggctccgaagccggggttttcccctacgtgcggggtacccgcgcccacaaccgctggaagatccaccagacggtcatcgtcaattgccccaaggaggcgaacgccatcgcgctcaagatcctcaatgcgggcgtcgattcgatcgaattccagatcgttccggagaccttctctgcagaagatctgaatacgctgctcaaggatattcacatccctgcagtcgaaattaccttcagcggcagtaaaaccgcccatgtggcagagttggtgatcgcaaagatcgaaaaggaacaactgcctgcggaagaggtgcacatcaatttctgcatcgacccgctggtcaagaaactgacttcgaaaggcagcttctgttcggagaacggtgccaaatgtttcgaaaagatcgccgacctggttcggaaaaccaaaacctacaaaggtatccgcgtaatcacggtatcgggcgaaatcttcagcaacgccggctcgacgatcgtagaggcgctcgccttctcgcttgctgccggtcacgactatctggtacgcctgatggatatgggcttcacgatcgaagaggccgctaaaaagatccgtttctcgcaggccatcacctcgaactacttcatggaaatcgccaaattgcgtgcaggccgtatgttgtgggccaacatcgtgaaagcctataaccccgcgaagaactgtccctgcaagatgttcacgcacgccgtgacctcgacgtggaaccagacggcatacgacccctacgtcaatatgctgcgcggcacgaccgaagcgatgtcggcatcgatcgccggcgtacactcgctcgaggtgactcccttcaacaaggcatacgaagatcccaacgaattttcgatgcgcatcgcccgcaacgtcgaactgctgctcaaacacgagtcgcacttcgatcaggtcgtcgatccggccggcggttcgtactacatcgaaaacctcaccgactcgatcgccaacgaggcgtggaaactcttccgcgaaatcgaggagaagggcggctacaccgcagcctatgaaagcggcttcatcgtagagcgcgtcaaggcatcggccgcagccaaggacaagaacatcgcaacgcgccgcgaaatcctgctgggcgccaaccaataccccaactttacggaggtcgccggcaaggagctgaccgaagccgccgtaacccgccccgtgagcgaaggcaacacgctggctccctatcgtggctccatggcattcgaagccatgcgtctgcacgtggatcgcagcggcaaggcgcccaaggcgttcatgctgacctgcggcagcttggctatggcccgtgcccgtgcccagttctcctgcaacttcttcgcatgcgccggtatcaaagtaatcgacaacacgttcttcaagtcgatcgaagagggcgtcaaggccgctctggaatcgaaagccgagatcgtcgtagtctgcgcatcggacgacgactacgcagaggcggctcctaaagtgaaagagctgctcggcgacaaggcgatcctcgtggttgcgggcgctccggcatgtatgcccgaactggaagcccagggcatcaagaatttcatcaacgtcaagagcaacgtactcgaaacactgaagttctacctcaaagaaatgggtatctaaaaagcaaaagtcatgagagcaaaattttcagatttaacatatgacggaggcgagcagaagagctgctgcgcttcgaaaggctgcggccaaaccgaaccgtggctgactgccgagcagatacctgtcaagggctcctactcggcaaaggatctggaggagatggagcacctgaactatgcggcaggtatcgcaccgttcctccgcggcccctattcgacgatgtacgtgatgcgtccctggaccatccgccaatacgccggtttctcgacggccgaagagtccaacgcattctatcgccgcaacctggctgccggacagaagggtctgtcggtggcattcgacctggcgacacaccgcggctacgacgccgatcacccgcgcgtagtgggcgacgtcggtaaggccggcgtgtcgatctgctcggtggaggatatgaaggtgctcttcaacggcattccgctggatcggatgtcggtgtcgatgaccatgaacggcgccgtgctgccgatcctggcgttctacatcgtgaccggtctggagcagggatgcaccctcgatcaactgtcgggtacgatccagaacgacatcctcaaggagttcatggtgcgcaacacctatatttatccgccgaaattctcgatgaagatcatcgccgatatcttcgaatacacttcgaagaacatgccgaagttcaactcgatttcgatctccggctaccacatgcaggaggcaggcgccacggccgacatcgagttggcctacacgctggccgacggtctggagtacttgcgtgcgggcgttgcagccggtatgtcggtggatgctttcgcaccccgtctgtcgttcttctgggcgatcggcatgaatcacttcatggagatcgccaaaatgcgtgcggcacgtatgctctgggcgaagatcgtcaaaaaattcaaccccaagaacccgaaatcgttggcgctgcgtacgcatagccagacctcgggctggtcactcaccgagcaggatccgttcaacaacgtagcccgtacggctatcgaggcgatgggagccgctctgggccacacccagtcgctgcacaccaacgcactggacgaggcgatcgccttgccgacggacttctcggcacgtatcgcccgtaacacccagatctacatccaggaggaaaccaacatctgccgcgaagtagatccctgggcgggttcctactacatcgaaaccctcaccaacgagatcgcccacaaggcctgggagcgtatcgaggaggtcgagaagctgggcggtatggccaaggccatcgaaaccggtattccgaagatgcgtatcgaggaggcggcagcccgcaagcaggcccgcatcgactcgggcatcgagaagatcatcggcgtaaacgaataccgtctggatcacgaagctccgatcgatattctggctgtggacaacacggccgtacgcgagagccagatcaaacgtctgaaggagttgcgtgcaaaccgcgacgaagcagccgtgaagaaggcgctcgaggccatcaccgaatgcgtcaagaccggcaagggcaacctgctggaactcgctatcgaggccgccaaggtacgcgcttcgctgggcgagatttcggatgcctgcgaggtggtcgtaggacgttacaaagcagttattcgttccatttcaggtgtatatagttcagaagtgaaatcagatcccgcattcgaacacgcgaaggaactggttgccaaattcgcgaagaaggagggccgccagccgcgcatcatgatcgccaaactcggtcaggacggacacgatcgtggcgccaaagtcgttgcgaccggttacgccgacatcggcttcgatgtcgatatgggtccgttgttccagactcccgaggaggcagccaaacaagctgtcgagaacgatgttcacgtagtgggcgtatcgtcgctggccgccggccacctgacgctcgttccgcagatcatcgccgaactcaagaaactgggccgcgaggatatcatcgtcatcgtcggcggtgtgatcccggcacaggattacgatgagctgtatcgtgacggtgccgccgccatcttcggccccggtaccccgattgcgaccgcagcgatcaagatcatggagatcctgctcgacgagcagaaataatccggatcactcctctgttattatcaaagccccgcatcttttgatgcggggctttttaatggggggggaagcgaaccggccgaccgaaaaagaactttgccatcgaccttcataattccatcgccggcctcacatccagagtccgcgcaaatacagcggcggatctcaaacaacgaccgaatacatgctgtcacagtgccatttccacaaaccctacaaattatgtttgtaggccatatttcccgttagacagacagcgaatatcctcccccccccggctctcgaaaacagccgatttcataccgcaaacacctatccggcaaaaacctcgactgccgaggccgtcgttctcctcccccagccccgaagacttccggaatatacgataaaatcacggacatttcgaagatgcggaaaaagagaacggcggattggccggactaccactccgagcacctcacaaaagagaagtcaggaaaccggctcttatcgcttttaagaagagaagtcatccccctatgccatcgcaataacgacaataaaaaagaggaatgtataagctacatccctctttttcggccggaactattccggaaaaaatctaccggtaacggttaaaaatacttgccgcgcaagtcctccacattcgacatctgctccaggaaatcgaacagacgacgctgaatcatcccctgcgacgacgcctcggcacgtaccttttcagcttcgatactctgcggagtttccgcctcctgaatatccgtcaccacgaaaacataagcacctacatttcccctgaccggctcggacagcgtattcgtctgctccgttgcggtaatcgctccgatcacacgaggctcgacacccatgttacggataaagaacgatccgtaacggacatcttcgaaaggaacgacttcggtaccaaggttttgggcgacctcttcgatagtcgaacccttcatttcgctgacgatcttttcaaacttcttatcggttataagcgtctggcgaatattgttcgctactttctcgatcggcgtataatcctcattgtcgatctcagttaccactgcgaccacatagtcatcacccacagggaaaatctcggaaatcgcgcccaccttggcatcgtatgcccagcgcaccaattcacgcgaatcagccagtccctgcagcagacggtcaccctgcgtgagtttcgcttcacgaggagtgaggtttcccttattcgctgcctcgttgaacgcatcgacagaacccttgccctcgacagagaaaagacttgcctgactatgcacattgcgacgggtcgccgacgaagcctcaacaggataagtgatcgtcgcaaggcgcatgtgcttcgaaggtttgtccagacgataaacctgtaaaatctgaataacgtcacccacttcgacacggagaatatccccctgcttagccgtcgaaagaagtcccgaaagctcgtccgggaatgcagagaaaggcatcacgcccgcatcgcctccatttccggcatcctgcatatagagcgaatgggtacgagccgcctgtgcgaaatccgcaccttgccgcaaagccgtcatcagactgtcggccaggtcgcgttggtcgtaggtgagtacaatatggcggacgcccacggaatccggagcgttcaaagtttcaacgacacgggtcatcgtccaggtatcgttcttcaggacgggaccatactgcttgccgttggccagcgcttcggcctcatcgtccagaagctgggcaaccgaccgataattgtctgtaattttaccgaaacggttattcttggcaaatgctttcggatcgtccgacgcggcaaattcatcgccgacttcccgaacggtcttctccaaagtcgccatatcctctgcactcggagccacttcgaacaccacataagagagcgtgcgcgaaggtttctgctcataacgggccttatggctattgtaataagccttgatttcggaatcggaaaccgagaacagagaatcaggcatatcgtgataacgcttgccgacccaagaaccgctgaaagtcttattctgcgcatcgacgccttcttccgcttccagccgattgacatatacaccgcctttgaccaagccgttatacttattgatttcgcgctcccgcatagcctgtccgaccaaagccccccacatatattgcatctggggatttccggttgcctgggcgataaaatcactcacaccctccacactgtactgtcctgtacgggggtcggtgaaagccgcagccatcgtcccggaataatactcgccgctgataagtccctcacgctcggcatcggtcaccgagattcccatcttctcgaaaccgggcaagtacacgtggttggcaatcagagtctgccaagccatttcagccaactgatccatctgctcttcattactttcggagatgttgctctggtctttcaggttgttgtatacctcaatatattccgaatatctgatcttcgaaccgtcgatcacaccgaccttggggtcgttacccgaaagtcccatatccgttttaagcgagagaatgaatgccagcagtgcaaacgcgatgataatcgacaaaaccacaccgaatctggtccgtaacgtgtttaaacttgccatataaactattttaatttattgtttcaaaatgagtgttcaaagataataaatatattctgaaaaccatgataaacgaccaaattctttcgtcattttccgcatccggcatatcgaaaaaacgcacttgcccttcaccggtcgaaaatatcccgtaaactacaaccgtttcacgcgcgccaactccaaccgggaacgggtcctgcgcagaatcttgatctcaagatgctcgaaacgcacggtttctccggccgccggcagcccttcataccggaaaatgatatacccggccagcgtttcgtactcgtcactctcgggtatggcaagcccgtatttttcattgagatattccacttccaatcggcacgaaaggacaaattccgaatcgccgacctgtttctccgtaaggtcgggcacatcgtgctcgtcttcgatttcgccgaaaatctgctccagaacatcctccaaagagataataccggccgtaccgccgaactcgtcgatcacgaccgcaatattgctcttatgacggatgagccgctgcatgagtgcttgcaacggcatcgtctccgggacgtattgcacctccatcagcacctcatcgatcgacgtcggatgccggaacagcgacttcgaattgacatagccgacgatattatcgacactctctttccagacgaaaatacgggaatacttactctcgacaaaacgcgccgtaagcgctttgatcgaggtatcatcgatatcgaccgcctccatatcgatacggggaaccatgcaatccctcacgcgcaaatcggcaaaatccagggcattctgaaagagtttgatctcattatccggttcatgctgcgcctccggcttccccgattcgaacaagctggccagatcggtccggtcgaaaatgggctccatcatcgcaaccttcggcttacgccccatcagccacaaaatcccctgggaaatccaggtcgtcagcttggcgatcggaaaaagcagcagataaaagaaatagatcgcaggagcaaacaggcggtaataaaaattcgggctgttccggaaaacggatttcgggagaaattcggcgacgaagatgatgatgattgtcgaaaccgccgtttccagaacgacggacccgccgcgagcgatctccgtccaacccactgccgccgcgagcgagcgcaacaacagcgacatatagagcgaatagataaccagggcgatattattcccgaccaggatcgtcgtgatgtactgcccggggtgacgggcaaaaatgtcggcgatgaaattgaacagccgactctgcttccggtcgatctccagtttcaggcggttcttgctcgtaaaagcgatctccatccccgaaaaaaaagccgaaagcaacaacatcagcagaattataaacaccgaagttatcataaggaacgatcgttactttctacgggagtcagttgaattttccggtcgttcccccgtatcggccgggccggtttgacaggctgttcggaaactgcctccttcgcagcggaaacattgtccgcaacgggtttcaccgacgtagaatccgcgtcccgtgtcggctcgatattgacccacatacgccctttgattcggcgaaatttccagtctttcaactgatcgtccgactcgaatccttcgacgatgtaggaatttccgctctcttccacgatcttggaatcgacgttagaccagatccggcgcgttttctcgttccagaacaactgctgggtgtagagctcctgtccgttggattttttcactacgacatttcctttggcttcccataatttccgattcccgtaatgaatcgcatagttagccgttagcgtagcatcgaccgctccgatactgtccttctgatatgtcacgatatccacgcccttgcgaaattcctgataaggctcttttgccaaagagtaaccttccaccaaaggagccgtaaaaacataggatttccggccgttctccgtattggtcatcgtcaaatgctcgctgtactcggtcatcaaagcctcatcgttaggctcttcggccaccgactccttgtcgcacgaatatagcaagatagcacttcccacgatgagaagtgctacctgtgcatatcgttgaatgcttcggagcatcgttcgtacaaactatgtcgctaccgggggcgtacggtcgtcacgataccgcgggccggaccgcaggtaatcgtataacgtgcaccctccatcaattcgttgaagaagcactcctcggcagtcgggaatccgcgacggtagtttgctgccgcatcacgcgccgtctgagcgaaattgccggcatcggcgtcgttggcaagcaggttggctgcctgcgtcatcgtatcgtaagcgacccagaaaatagcctgaccctccagtccggagcaggatgcagccgaagccgcataagcctgcgccaaggcgaaataagccataccgttattgggattcagcgccttggcctcattagccgcaactgcagccgccgtaggattcttggctgccagttcggtcatactcaaacgcaccagaagcaactctttctgaacggcgtcttgttcggcagcaatcgcctcacgcaggtaagtagtcgatttggcgaagtcgccccgctcttgaaatccttgagccagcatcatggccgtctgggcagaaggttccatcgcataatatttttcggcgatctgaaggaaaaattcggaactgcactgcgaacgggacatcagcgaaaccgtctgcttgagcaactccatatcctccggagccgcttcgatacgcggacggaacatcttctccaggttctcgcaatcggcagcaccgctacccgcaaaacaagtatcgaactgtgttttcgcctcctttactccaggagcatcactctcgaaaatcggggccagacgagcgtactcatccaaaacggcatccggatagacctcgcccatcttataatcatcgcacaaattgctgaaatataccaatgcgacatccggcagcgcagcataaccgctctgcaaaccggcttcgatcgcctccttatacaacttgcgcacgccttcccggtcggaaggattgaaagtcaggtattcacgagctttacggtcaaggacataagccgtaccgtaattgggactggaaggaaaatactgtacacgcaggtcgtaaatcatcatcagcgaatcgagcagagcttttttctcattcaggtcttgtgcgcgttgcaccttgttcgaataaacctgtgccccccgaataaaggtcgcttcgaaagccgaaggagcctcctgtgcaagcgtacggaaataaacagcggctgcgtcgtaatcgcgggtatcgacagcttccttcagcaggttgctcgtcagaatgttttgcttacgctgttcgggcgtatctccccacggagcgtaccgagggtcactgaaatcctgggcgatcgaagctgtcgcagcgaacaccaatactgccgacagcaaaattttcatgcgattcatattcttctttataatttattttttatgtgtggtttaatcgtatttcggacgaacgaaccaataatcaccgaacaatgtcacacccagcgaaaatttgcaataggtctgtttaaccagactcacctgttcgttgatcgccttgaaactgccgcgtccgccgacttcgacacccagatcgaccgacgacgcacccaatatgccgcccaacaccgtcaggggaataccgacgcccagcgtcacggcgtattcattgacatccactccgccgaaagtctggttataggtaccataacgaactccggcccggtaggaccagcgtttcaatgcgctgcgtacatccgctttattgggggtgtattcgaccccgagtttaaccgtattcgtgttccggtaagccacatcgaaaccggctgcggatttctcgaccaaccgagaattgccgcttcgccagtcctgatagacgtaatccgcccccacagctattttaggcgtgttgtaataaatacctacggcaacctgctggggcagcttgagccccagacgatttcccatatccatagcgaccgtattgaaaatatcgccggtctgcaccttcgtcgtcacattcggattcaagtcgccgccgatatcgtaggtcgcaccgatcgtcagaatacgccgacggttgctgatcggggaccactgtacgccgaactgtcccttaaaacgggaaacgctgtaggtttcggttcccgtcgcgtctgcgataagacctcctccggttatattctccaaaatagcggttttataaatccgctgaatgtcgccccaatagtactgggcagctattccgatcgagaatccgcggaagatctcccagcccagaccgagcttcacctccgtcacgtcgccgtcgccgtcccactggtactgcacgcggccgatattaccccagatttcatcgtcgtccacctcctgtttcatccggtaaccgacgctgctgtaaggcgtcaggctgaagcccaaccccaaatgcttggcaatcggcaactgaaacgcaatgtcgtggaaattgaccgtataataacttgtattgagcgtctgcccgtaatatttctgggaattgtaaaagcactgcccttcaagaccgaaatcgaaaaggaacgacttggggcgcacggcactgtaagccgccggattgagcaaattgacagcagccgcattacgcataccgacgccgacaccgcccatcgaacgtgtctgaagcgttcccggggtccgcagttcacccagaccgtacatcgaatacggtgaaaaagcgttgatactgctggtttgtccccatgccatgcacggtacaatgacggccagcgcgaggcacagtttaacggcggctttcttcacttgcattatactctaaaattcggttcagccccagaaagaccaaatcacaatgtgcaaatatcgtatttttaattcgtttaacaaagaattttgcatccccgccggtaaaaattatcgacaacgcatcgatttccggaaacagccgggcgatatacccctcgatttcgaaggcaatgccgttcatcacgccctgccggatcgcctcgacggtcgaacgccccaaaagcgtctggtcctcacaggattcacacaggggaagcgccgccgtataatcgtgcaaggcccggaagcgcatctgtacgccgggagaaatattaccgccccggaaaaccccgtcggcagaaacctgatcgatggtaatggccgtcccgaaatccacgatcaacagattgcggcccgggtagagcgacgcagcgccgacggcagccgcaagacggtcctccccaagagtttcgggcgtagtgtaaccgttacgaatgggaagaggaagttgcggagagagccgcagacagcgcccgatgcggcgacgcaccagcgcgacggtgtcatcgaccggaccgcgcgtagtcgcaacaatagcctgcgtaataccgggatgagcagcaagaatccgatctatcaccgcctcgtcgaactcttccgaacatccgtcggaaacgacggtaccgccgtcaaatacagcgtacttgacccgcgtgttacccatgtcgatcgtcaggttcatcgttgaattttttgcttcgttctttccgtccggcacggccgttctccaagttcactgcggcacgaatcgttcacaaccgtccggattcagtttttatagcagttatatacttttcggttaccacgaccgttctcttaccgatttcggcggcaccccacaaccctgcggagcgttatgccgtcctccggccttctcccgagggaggaacttcgggaaaaagacgaggcatatcggtcgcgttcgggcaagtccatacatcaaaacattatgattatactccccagctctttctacaaagatttaagcacctcgtatcccgctgcgacatccttaatccccctaacggtcatcgccaggcgattattgtgttgcttgagaacaaatcggtcggggcgctgcgtcactttgcgcaaaagctccatgaacgtatcgctcttgtagtaaggagaatcgtcgtcgcctacgaaatggacgatcatcaagccgtttttgaccttcacgcgctccatacccagccgcacggcctcccaccgcaggcgaaccacattgagcagctcggcagcgggccggggcaacggaccgaagcggtcgatcagcttggcctcgaaactcttgagcatctcctcgttgcgagccgtatccagctcccggtacaagcgcagcttctcggcgggctgctgcacgtaggagtcgggcagctcggcctcgacgtcgatttcgatcacgctgtccgaaatatagctcatcttatcgaccacgccctgctcggcatcgctcatgccgggcatctcgagtccctccgagcggagttcggcgatcgcctcctgcatgatcttctggtaggtttcgaaaccgatgtcagcgataaagccgctctgctcggcgcccaacagattgccggcgccccgaatgtcgagatcctgcatggcgatattgaatcccgaccccagatccgagaactcctcaatggcccgcaggcgccgccgggcatccggagtaagcagctcgtcgccgggcgaaagcaggtagcaatacccccgctggctgccgcgtcccacacgtccgcgcaactgatgaagatcgctcaagccgaaattctgggcattattgacgatgatcgtattggcgttgggaatgtcgatgccgttttcgacgatcgtggtcgaaatcaacacgtcgaactccccgtagataaaatccataatcagcttttcgagctgttcggccggcatcttgccgtgaccgatccccactcgtgcccgggggcagagccgagttaccataccctgaagcgtcatcagatcctccacccggttgtggacgaaatagacctgtccgccccgatccagctcggcattgactgcgtcgcggataatctcctccgaaaagagatgcgattcggtaatgatcggctgtcggttgggcggcggcgtcgagatgacggagaggtcgcgcgaccccatgagcgagaattgcagcgtgcggggaatcggcgttgcggtgagggtcagcgtatcgacattgacgctcatctgcgtcagcttctccttggccgccacaccgaacttctgctcctcgtcgatgataagcaatcccaggtcgtggaatttcacctgcttgcccaggatcttgtgcgtaccgatcaggatgtcgatgcgcccctcggccagctcggagagaatacgggacgtctctttcgaagacttggtccgattgaggtattcgaccttcacgggaaaatcccggagccgatgcacgaaggagcggtaatgttgcagggccagaatcgtcgtaggcaccagcacggccacctgcttgccgtcggtcgcagccttgaacgccgctcggatcgccacttcggtcttgccgaagcccacgtcgccgcaaatcaaacggtccatcggctgatcggactccatgtcccgcttgacggcctgcgtcgcggtctgctggtcgggcgtatcctcccacatgaacgaggcttccagctcctgctgcaaataagtatccggcgaaaaggcaaatcccttgctggccttgcgcttggcatagagggcgatcagttcgcgcgagatgtccttgacggccttcttggtcgcggtcttgagcttctgccaggctccgctgcccaatttgtagattttgggcgcttcgccttcgccgctcttgtagcgcgaaatacggtgcaaggcgtgcacatgcacgaacaaaacatcgttatctttataaatcaacttgatggcctcgtgtaccttgccgttctcgttgatcttgaccagaccgccgaaacgccccacgccgtgatcgatatgtaccacataatcgcccatgcggagctgattcaactctgcgacggtcatctgctcgtcgcgcttgatctcgccgttgatccgatagcgctggtagcggtcgaaaatctgatggtcggtatagaaacaaagtttcaggtcgtgatcgatgaaaccctcatgcagcgtgatcggcagggggttgatctgcgcctccttacgccccgactggtagaaaatgttctccagccgttcgagctgcgcccggttttccgacaggatataggttttataaccgcgctgtccgttggaaatgatgtcgtcggccagcaattcgaaattcttgttgaacttgggctggggagccgtgcggaacgcgaccgtcgcatcggccggccgctccttcaggctgtcgcgcaattcgaacaaacgcatcccggccatgtcctgcaacaacaccttccggctcaccagatgggtgtcgatctccgcaggttcctccatctcccccagaaccttgcgacgcagatcgttcacgcgccgcagtacgtagtcgggatcgaaaaaccagtaaatcacctctcctgcaaatgcaggcagcgaaatccgatccccggcaaaaccgttcaggttcggaacgatctccacctcgttcagccggtcggcggaaagctgactggaaatctcgaatcggcggatcgaatccacctcttccccgaaaaagtccaaccggtaaggtttgctctcggaaaaggaaaacacgtcgaagataccgccacgcagcgaatactgtccgggttcgtaaacgaaatccaccttcgtgaatcccgaatcggccagcaactcctccagctctccgatcgccagccggtcgccgaccttcacccgcacggtttcgcgccgcatcgagtcggggtcggtcacccgttcggccagagcttccggataggtgcagataatccggtattcgcccgcagccatttcccgccgcagggcactcaacgccgccgtccgctgcacgaccccctgcgcatcctccgtaccgtaaacgatcgaacgcttgtaggagcccggaaaaaagtaaacctgtttttcgtcgagcagggcataaaagtcgttgagcaggtaggccgccgcatcgcggtcttccgccacgaagacgtgcgtaccgcccgttcgggcgatcagggcagcggcataaaccgagagagccccgccgaccatatcgcgcagaagaacggtccgccccgccgaatcgtacgcacgacgcatcgcgccgagaggctccgctccggcgatcaactgcaagatattcggtttatttccgggacccatattccgcccagctaaaagatgccctgcaggaatcgattccgcaaggcgctcaaacgattattcaactccgtgtattcgtatcggctgcagatcgtacctgcgaccgaacatgtatgtctttccaccttccgcctttgtccggctccggacttcgtccgccttccggccagtaaaaggggccgaatcccatccggcacatcgaccgagcccatgcctccgtccctgcggcatccggtatctctaatccttatacaggtctttgccctccttgtcgtagtagtggacatcgacgataccgacgctctggtccgccacgatcttcaactggatcttatacttccacatccagcggcggcgcaacgaccacaggccgtgattcaagtaggtcgaaacgtaagggctgacgcgcaacttgatatatttgtgccccgcatcctgggccagataggagatcttgttctcgatcttcttgtcgagcagaacggtcggctcgatacgccccgtgccgttgcacgtgggacagacgtccgtaacatcctgcacggcgaccggacgcacccgctggcgggtgatctgcatcagcccgaacttggtcagcggcagcaccgtatgcttggccttgtcggtggccatcagcttgttcatctcctcatagagcaactgacggttcgcagccttgtgcatatcgataaagtcgatgatgacgataccgcccaaatcgcgcagacgcagctgccgggcgatttcgcgtgcagcggccagattgacatcgaaagccgtctgctcctgatcgtcctccgccttggtgcgattgcccgaattgacgtcgatgacgttcatcgcctccgtgtgctcgataatcaggtaagcgccccggcgcaacgacacgtacttggcgaaaagcgacttgatctgcttcgaaatgtcgaaattgtcgaagatggggacgttgcccctataaagttttacgagtttctcgctctgcggttcgatctgacggatgtagttttgaatctcatggtacatcgcttcgtcgtccacgacgatctgcgaaaaggcgcctcccaacgaatcccggataatggtgttggcccggttcatctcgctcatcaactgagccggagcgggattcttgcgaatattttgcagggtcttctgccatttgtccaacagggagcggatatcctgttcgatatcgctgtccttggcctcgacagccgccgtgcggatgataacgccgaaattcttcggcaaaacggcggctgcaatgcccttgagccgcttcttctcctccgccgagcggatcttctgcgacaggaacaccttcgacgaaaaaggcaccagcaccacgttgcgtccggccagcgaaatatcggccgtcaggcgcggtcccttggtggaaatcgcctctttggccacctgcaccataacggtctgccccacctgcaggtaggagccgatcttgcccgacttttcgatcggcggctccagcttcatcgcgtccaggcggattccccgcttgccgggctggtaactcgccaccagcttctgcaacgaagagaactgggagcccaagtcgagatagtggataaaggcatccttctcatggccgatattgacgaacgcggcgttcagccccggcatgatcttgcgcaccttgcccagataaatatcccctacggcgaatcccgtctggcactgctccttgttgagctcgaccagcaccttgtcctcgcacagggcgatcgaaatctcggtcgggtttacattgactattaattctcggttcatatatattttcgtcccgcagaccgcggcgacgattctgacattatggggtttgcggctgttcgacgttcgggaagcacagcccggcttccattgttttcaactcgcctggtccgtagaggacgatattgcggcacattcccttcgcaaaaagcctcttttggcttttcgggagcggattcgatatacggtgatacgttcacaaacacatcgtcctctccttcccgacgatccgacatatcccgccctgcgaacggagcgggaatcggaaaacaggtaaagctaaaagggcctcgcacccttttagctttatctaccttaattagcactaaggcgtgctacctactttttcttgtgacgattcttgcgaagacgttttttacgcttgtgggtcgccatcttgtgacgcttatgtttctttccgttcggcataactgtaattgtttaaagtttctattatttatttaacttttgccgcaaaactctttgcaggcttgaaggccggaatgttgtgggccgggatcgtaatggtcgtattcttggaaatgttacgagccaccttcttcgcgcgttttttcacgatgaagctaccgaaaccacggagatatacattgttgttctgcgccagggaacccttgatgctctccataaaagcctcgacgatagcctggacctgtactttttcagcaccggtacttttagcgatttcgctaacgatatctgcctttgtcatactctttatatttataagttaaactctatttcgggactgcaaatataagttttatttgattatatcacaacaaagtagaacatttttttgcaattcacctcccccgcgtcgcgccgcagttcgaaaccccttactcaaataccgggccataaaaccgcgcttcgatacccggcgggccgaccggagccggaccgcaccgaagaatatccggaaaaaggcaacgcattatcaaacaacccgatagccggaaccggacaccgccgcccgaaagtttcgtccgtcgggcacaataaattacccgaaattcgcattgtataattggtaaaatcactatttttgtagaagataggatccggttcggcaatcccggcgaacaaacccgcaacctttcactatctttgacatagtcttagatagaatgcgcctcgggaaaccgggacagggtcccgttttctcccggctttcactatctttgtttcaactaaaaccgcgaatatggtcaaaatactttgggtggacgacgaaatcgaactattgaaaccccacgtgcttttcctccggggaaaaggttacgaagtcgatacctgcaacaacggatacgacgcgatcgacatggcgacggagggcaactacgacctcatcatcctggacgagatgatgccgggtatgacaggactcgaaaccctgccgaaaatcaaggaaatacgccccactactccggtcatcatggtcaccaagagcgaggaggagaacatcatggacaaggccgtcgggtcgaagatcgccgactacctcatcaaacccgtgaatcccaaccaggtgctgctctcgatcaagaagaacgtccactcccagcaactggtcaccgaacagaccacagccgattaccgggcggagttcgggcgcctctcctcggcactccagatggccgacagcttcgccgactggtgcaacgtctatcgccggatcacgaactgggagatcgagctctccgattcgaccgaccaaagcatcaaggaggtcatcgaataccagaagcacgaagccaaccaggagttctgcaagttcgtccgccggaactactacgactggatcaacaagcgcgacgaaaccaccccggtcatgtcgcatacgctcatgcggtcgaagatcttcccggtggcagacgagaatcccaagaccacgctgctgctgatcgacaacttccgctacgaccagtggcgctcgatcagccccctgctgcgcggctactacgacatcgcggccgacgatttctactgcgcgatcctgcccacggcgacccagtacgcccgcaatgccattttcgccggcctgatgccgctggccatcgacaagctgatgcccaacaagtggctcaacgacaacgaggagggaggcaaaaaccaatacgaagaacagtttctgcaacggctgatgacctccagcggcaagaactacaaatacaccttcgacaaactggtgcgcccggaggcgggccgcaagctgatcgacaacatccagcggatttacgacgccgacttctcggtgatcgtctataacttcctggacatcctctcgcatgcccgcaccgaaacggacatcatccgcgaactcaccgaggacgaagcctcgttccgctcgctcacccgttcgtggttcgagcactccgacctgctgacactgctgcgcctgctctcggaacgcggacacacggtaatcatcacctcggaccacggcacgatccgcatcgacaacccggtgaaggtgaccggcgaccgcgaaacctcggccaacctgcgctacaaaaccggccgcaacctggcctacaactcccgcgaggtatatgaaatcacccgcccggaagacatccagttgccgtcgatcaacctgtcgtcgagttacatcttcgcttacaacaccgatttcctggtctataacaacgacgccaaccgttacatacggtactaccgcaatacttaccagcacgggggaatctcgatggaagagatgctcgttccctacatcgtactaaaacccaaacaataaatcatgcagaccatccacatcgactctctggacgaattgccgcacgcagcggccgccgtcataaacgcgctcgaaggacgctcggtcgtcgttttccgcggcgaaatgggggcgggcaaaaccaccctgatccgggaaatcgtcgcccggctcggagctgacgacacggtgacaagtcccactttcgccatcgtcaatcaatatacgacccgcgaagggaagaatatctatcacttcgatttctaccggatcaaccggctcgaagaggcttacgacttcggctacgaagaatatttctactccggggatctctgtctggtcgaatggcccgagaagatcgaagagctgctgcccgaagaggtgatgaccgtgcggatcgccgtcggcggcgacgaagagcgcacgatcgaaatcgactgactcccgattcggcccaatatccctgtatagtacttctcaacacagacttcccgccctccggctccagcaggcgagatcatccggcacacggttgcaacagagagtgtgtgatccagcccggctcgaacgaccgactgccgaaacgaatatcgggcgtagtaagtttccccaccccgcaacgtgaaacgggaaggagtcgggaacccgccggtcagattcggctcgctacactttatcatccttgcagcaaatagggggggcaggctcaaacgaccaacattcgaagcatacgcagaggacacttgtgaactctaccatgcaaggaataggaaaacagaaagttaagtttggattagcattcggctttcactatctttgacatagtcttagataggatgcgcctcggaaaaccgggaacaagttcccggtttttcccagttttcactatctttggccccgaaaaataagggcttcgaaaaacggtcgcccgggaaaagcgaaaaatttgcaaaaaaagcaatcgccgcttttgacgacaaacacacgacaatggaaaaatacgaatcgaaacaccaacagatactccgctcggcggaacagatttatacggtcatcagccgcttcgacaatctcactcctgcggtgcaggacaaggtcgaagagtggcgggccgacgaaaacagttgttcattcaaagtcaagggcttcaccgtcaatctgcaaatcgtggccaaggaagctcccaaatacgtcaagatacagagcggcgaaggcggcgtccccatcgacttcaccttctggatccagttgcagccggcaggtccctacgatacccgcatgcggctggtgctgcacgcggaactgaatatgatgatgcgtatgatgatcggaggcaagctccaaaaagcgctcgaccaaatcgccgaagccatggccaaagccatgaacggcagcgcgatgtaataccgatgtaataccgaatacccaacgaaaaacccggtacagatcgcaccggttttttcgttgataccctcgttccggacaataccgcagcctgaaaccgatacggcaaggcaaattatcaggcaggaaccgcctgtcccggacaggccgcgacatcgggccggcggaaaaatcgtcctctatctatccggcacgaaaagcggcctctatttttccaaacattcgaacacccggcgcaccgtaggaaacatcccttcgagccgatctttcagttcggcggccggacaccacgcagccacatcgattccctcttcccgctgaggtttaagggctcggctcgaagaaacgcgcatttcgaaccagtgcgtagccttgagctcccaccgcccgtgcatataataggcatgcaacgtccggcaaaggaagcgaaccacctccgcacccacagctcccgtttcctcggcgacttcgcgcacggcacattccgccgtactttcgcccggctccacatgtcctttgggcaaatcccagcgcccgttgcggtgaatcatcaaatattcgccgcgatcgttcactaccacgccgcccgcagcctcgacagcagcgaattcctgccggaagagggaaaacgcctgctcgggatcgggcgtacaaaccgcaacctcattgtgagtttccagaaaattaagtatcttcgtccgggaaatacgcccgccctgcggaagatcgacggcaaaaaaacgtgccggcgacgtttcatcggtaaaaatcagagttttatctgcaaaatatagatagatacgcataaaaatcgctattgacaagcgcaaatttaagtataaatcatatgaagtaaacccgatctcaaatgaaaaatttattcctctttatggcaattacgctcgtgggactcggcggatgcagcgaaaagcgctcccagcccctcgctatcgacaactcgctcacccaggaagagatcgccgccggcgttctctcgcccgaagtgatgtggaaaatgggccgcgtaggactggcctcgctctcgcccgacgccagtcggctgctctacaccgtcacctggtacaatatgcaggagaaccggggcgttacggcgatctacgttcgtgacgccgccagcggcgaagtcgcccagctgaccgacttttcgtcgaacaactccgatccgaaatggaatgccgacggcagcaagatctacttcctgtccgaccgcagcggaagttcgcaaatctgggaaatgggtgccgacggacaaaatccccgccagctttcgaaactcgaaaaggacatcgaagggttcggcgtaaatcctgcgggcgacaaagtcttttatgtacagggcgtacaggtcgccgaccgcaagtcgtccgacatccacccggacatggccgaatcgaaagcccgcgtttacgacgacctgatgtgccgccactgggaccgctgggatgaaggcgaataccgccacatcttcatcgcggacctgacttccggcggcatcgggaagggcgtggacatcatcggcgaaggtgcggagtgggacactccgctggcaccctatttcgatatgtccgaaatcgcgtgggctccggacggcacccgactcgcatacacctgcaaaccgctgacaggtgcgaaatacgccgtttcgaccgactcggacattttcgtctatgacacggagacaggcgccacgaccaacatctgcaagggactcacccccatctccggtcacgatgcggcagccaaaaccgaactgcctttcgtcggctacgacaaataccccgtattctcgcccgacggcaccaaaatcgcattccgttcgcagcgtcgtgcgggcaatgaagccgacaaggagcgtctgatggtctggaattccgaaacgggcctggtgaaggaactcacgaagaatttcgactacaacgctaccaacgtcatctgggacggcagcgaagcgctttggttcctcgcgccgatggaggctacgcaccagctctgccgcgtggacatgaacggcaacgtttccgtactgacccggggcgatcacgacatcaacgccgtatcgatcgcaaacggcaaggccgtagccgatatctgcacgatctcttcgccctcggagctctatgaaatcgacctgaaagacggagccctcacgcagctcacgttcatcaaccagccgatcctcgacaaaatccgcctgggcaaagtcgagaaacgctgggtggaaaccaccgacggcaaacagatgctgacgtgggtaatcctgccgcccgatttcgaccctgcgaagaaatatccgacgctgctctactgcgaaggcggtccgcaaagcgtcgtatcgcaattctggagctaccgctggaacttccagctcatggccgccaacggctacatcgtcgttgcccccaaccgccggggcgtgccttcgttcggacaggagtggctcgaccagatctcgggcgactactcgggccagaacatccgcgactacctctcggccatcgacgacgtcgccaaggagccctgggtggacaaggaccgcctgggctgcgtcggcgcttcgtacggcggttattcggtctatttcctggccggacaccacgacggacgcttcaaggctttcatctcccactgcggtatcttcgacttcgaagccatgtacggatcgaccgaggagcttttcttcctgaacaacgactacggaggcccctactgggacaagcagaacgcgacggccatgcgtacctatgctaactcgccccacaagttcgtcgataagtgggatacgccgattatgatcatcaccggcgaactcgacttccgcatcccctatacgcagtcgctcgaagccttcacagcagcacgtctgcacggtatcgacgcccgtctggtcgaattcgaagacgaagaccaccaggtgatgaagccccagaactcggtggtttggaaccgcgaatttttcggctggctcgacaaatacctgaaaaaatagcgtttttcaaccgtttcgatgcgaacggcggccttcttccgggaaggccgccgttctattttccacaacggaatcggaagccattgataaaaaaagcgtattggtgacaacttttccgtcgctcgttgaatttattttttttcatgttccgcaaactataattttgacttcgaacttaaaatcagataagcattatggaaacaaccaagacgcttcgcaagtatgtgacccccagcatcggggttttggacatccgcatagagcgcggattcggcgactctttcccgggcggcaccgtagaacctatgtcgtacaacgacgcaacgaacgacagttactaattaaaaccatcgaacttatgaaccgcataatcaatacccttgccctcgcaacggccggactggttctcctctgcggatgctccgccgatcctgcgacggatgaagccgctccgggagggaacgacggaaaaaccgtccctgtctctttcgccgccgaactgccggcaacccgtgcgacgatcgaaatcggcgacgaccgtttcaacggcgcctgggaggtcgatatcgacaaactcggcatacacgcaacgctgaacggcgtcgcgcaaatcaacaaacccttcgtcttttcgagcgaaggcattttcaaaggtgaactcactccgggaaccggcgcctggacctacctggcctattatccccacggagagcaatccctgaacggcacgtcggccaccattcctttcggcaatacccgcatccagaagggcggaacctacaacagcctgttcgacattctgatagcacccgcacaaactacggccaattcagcggaaggcgtcgatgacagcggcgaaaggatccgcttcaatatgcagcggctgacgtcgatcctggatttcgacctgaccaattcgacctccgacccgattcgctgcgtgctgctgacggcggaaagcgacgatttcctgtcggccaaatccctgaatttcgacctggcacaaggagaggccgccgcacccgcactcgacacggaagaacggtcgaagtcgattctgataaacttcgacggcgggtctgcatcggccgcagctcaactggacgccttcttcaatgtcctgccgggcaattacaacctgaatctggacatcatcaccgccaccaaacagatggcctccgtaaagatcgaccgtaccgacaagccgttcgaggcgggtgtcctctacaagaaagaggtcggcacgctgaccccctccgccattcctgccccgtcgctcgactggcccgaccaggacatcgacgccacgcatgaaatcacggtagggccggaccagtcgctcacctaccccgcagccatcgacatcacggtaccgggcggtatcgccgaactgaaagtcgaaatcgtttccgacgccctgaactcgctggggatacaaaacctcgatctggtacacgaaacttcgatcgcaggaagcatccaatacaaagacttgggtctgaaatgcggcacggagatccaatatacgaaatcgaccgtattcgacatcaccaagctcgtcccgatgattgcgatgctccccgacgcaatcggcaaccacgtattcaaggtgtccgttaccgacctggccggccaaacgaccgtacaggacctgaccttccattacggccaggtaacgctcgaaaccgccgacctgtggcaaaataccgcaacgctgaaaatcgtcccctccgcaacggccgcgagcgcgacgctcgaatacaagcgcagcaccgacgacgcctggcagcaggcgaccgtttccgacaacggcgacggcactttcacggccgcgatcgagccgacctggagttcatcgaccaacgaaatgggtaaaaccgtttacgaaccggactatgccaccggcgttttcgcaggtacgacctacgattaccgcttgaagctggacggtacagaaaaggaaaccggacgtttcacaacggccaaaggcgatgtaattcccaacgcggacatgtcggaatggagtactgtttcccgggcaggtctgtccggaagcaaagacgttccctaccccaataaaaccggagattctttctgggactgcggcaataacggcatcacgacagatttgtgttcttctaccacggataaattcggcgcagcggtacccgcagcgaaactgcagagcaaaaatatggtcgtcctggctgcaggcaatctctttaccgggagtttcaactatgccagcatgaccggtacggtgaaattcggcagcaaatacacctacacggcacgtcccaaggctttgcgcgtaaaatatcacgccacgaccggcgacatcgacatcgtgcgatcgcaaaatccggcccccggtgtggcaaagggcgatcccgacaaatgccgtatcttcgtggcgatcgtggactggtcccagccccacacggtcgtttcgggaaccggctcgaccacgggagcctgggatccggccaacggagcggacgtcgtatcggaagcaggtaaagtcgtcggctacggctcgatgtggatcgatcaaagcacccccggcgatgccttggtttcttccgaagacgcactcaaaatccattggtacgaagagaaagctccgtctcccacagggaactacacgatcgtgatctcatgcgccgcgaatgcctacggcgactacatgacgggctactcgaaagcctgcctctatgtcgatgacttcgaatgggtatattaactccattccagcgatattccgtcaaatacctccttggaataaggaggtatttgacgttaattccacgctgttatctcaaacaaaacgcccgtaaaaccggggattcgtgatgaactttacccgtttcgttgaatttatttccattatagaaaaaacccgtttatttttgtgaaaattgtgaatatcattcactaactgtcttatggcgaaaaaacatcggatccttctccctgtactggcgctgcttctgatcggcgcctgctcccgcaacgaggaaatcgagcagccgacttctccgtccggcggagtcgaagtcgccattttgtgcgacaacacgaaagaaccgcaggtttacagtctgcccgacggtacccgaacctggatcgacgacaacgactgggcttcgacccgctgggacaaaaatgacaagatcgccctttgggcgaccgccgacggcagcaactatacgctcaacgcccagaatttctcgctggcctacttcacccccagctattcgaccgccgttttcaattcgacggtcgccgatatgccggcaggaacctatacctacacggccgtcagcccggtgcccgaaagcgtcagcggcacgcaggtatcttaccaaattccggcaaaacagacgggccgttacgagggaaaatgggatattctggccgccgatccattgaccgccgacgcgcttcccttgttcgaacagtccgaccaaatgctcgaaactccaccgtcgcacgcgctgcgcttccgtcacaaatgccacgcactgcgaatcgaagtccctgcaggccgcaacatctggggcgaaccgatcacacgtctggtcatcgatttcccgacagaagtcgtcggaaccgtttcgttcgacgctgccgatccgtcggccccaatgtccctgaccgaaggctcgaagagcatcacgctcgatctgaataccccgctgacggacgaagccgaaaactatgcctgggccttcatcaaccccacgacggtaagcggcgacatctcttttacggcctatacagcaaacggataccgttcccacacgctctccgtcccgatcgaccgcgaaatggcggcagggcacatcacccccattaccttgacgatcccgaccgagttgccggtaagctatgtcgatttttcggtcacgggcgactcctcgaatctgggtgaagagccttacaacctgatcgtcaaagctcccgaaggaatgactttccgcgacgggacgaccgagcagaccttccccatcgacgaatccaacaaatacacggtggctttctacggcgacctttacggcgatctgctggctcaacaaccgttgcaggtcagcttcgaaaccgaaaatgccctcgtgccgcaaaatgtaagcgtcgcttcgttcactcccggcgaacatctgccgatcgcactcaaaatcccgtaccttctttcggaagatttcgacgataaaaccgatttcgaatacaaaacagaagctacgacatccaatccggacggtatctctctgtcgcagtacggctttgacgagggttggacgggaacccgtcttcaggtttcgcaaaaggcgatgcgtatttccgtccgacacgaaaccgtagcccagtatccgggacggctcgacactccgccgctcgcctatatcaaacccggaaaaaccgtaaagctgaaagtgaccttcaatgccaacaaggacaacgactatctctattgcagtttcggaaccctcacggatacggcacctaaaaaaggtaacgacggcctcgaaaacacgctgaaagaacagatcgacaacctcaatacactgagcggcgtatcgttcggaaatattcagggagtatgcacctgcgaagttcccgcagcaacgaatgcaacgcgcctgtcgatgctgactcagagaacatacaacttcaccggcaacggatgggtatcgagaacttggtatatgtacctcgacaacatccgcgtaaccatcgtaaaataaacctccaaatcaataaccctatgaaaaaatacctgttgattctaacgacccttgcactgttgggggggggctgctcgaaagaggaaatccccgaaacgacagacggggaaggctcggtcgaattccggaccacgacctgctccgaggtcgattcgcagacgacccgggcgcaaacgtccctgccggacaactgcaagccgtccggcaacagcttcaagctggtcgtaaaaggcaaagaaggcaccgcgacagcggaatacctcgccgaatacaccacgctcagcgaatatacggcccccttcatgcccagcggcgactatacggcgacgatcagctacggcgatccgcagcaggagggcagcacggctttctgctaccagggagcgctcgactttacaatactcgcccgcaagacgattcaaaagaccattaccgcctcgctcacgaactcggtaatcagcctcgaatgcggcgagtggttcaagaaatactattccgaagcgcaattcaccgtccagaccgaagcgggcaacaatttcagtttcacccactcctcgtcgcccgatactccgatcttcgtcaagccgggaagcaaacttctgctcaaaggtacggcggtgaaggcgcagaacggcgtgaaagtggaattcccgcagcagcagatcggtgtcacgacggcccgcacctggcacaaaatccggatcgacgcttcgcaggcgggacagggcagcatcagcatccgactggacgatacgctgaccgaagtacccccgcaggaaatcgaactcaaccccgaagcataaccccgtataaaataagctaaaaacagatcctatgaagacttttaccaaatatttgctcttgccgctctgctgtcttttcatggcggcgggatgcggaaaagacgatctcccgacgggcgaacaaccggaaggacccggttcggaaacgggtatcctgagctttgagaactgggacctgaccgtagcggacgacatggaaattttgccgacggacaacgctcccggcacctcttcgacgcgcagcacggtggacgcaccggacgattatatcataaagatctacaattcgaaaaaagaacaggtaggcagctacacctatgccgaaataaagaccacgggcaacatcgaattaccgcaggacagctataccgtcacggcggaatcgcccaattacgccagcattcccgacgtagcgtgggaaacgcccgtctattacggcgaagtttcggtcaacgtaatcaaaaagctcacgacaacggtcaataacctggtctgcaaattgggcaatatcaagacgacggtcggactttccgccgatttggacagcctgttcaagccggacgacgaaacagacaaactcaccgtcaccctttcgatccaggacaattcactggtttacggccgcgccgaagctacgggcgaaacgctcaaacccggtttcttccgtgcagtcgatacggacaacaccctgaagatcgtcctttccggccaatacaacaaagccggcgagggagaaccggcctcctatgtgccggtcaattggagccaggagatacagaacgtcaaagccggacaatggcgcaagatcaacatcaagatcctgcatgccagcgacggcaacgtccaattccaggttacggtcgaaacatgggtttacgacgagaaaatcgacgtggacgtcatgtcttcgttctattcttacggcgaagaggagattcccgacgaagaaatttcggacgagaactctccggcagtaaccctcgaaaacggggatatcgcccagccctaccccatcacgaccagcatgttcgacttcgacgttcagagctgctccccgatgattacggccgtcgtaactccttaccagggttcgaccgtcgcctcgctggaggttgtcttcgattcggacaacgcccagttcctggaagctctcgcaacggccggctacagcgacaacacggtagccctctggccgggcgaaaatccggccggcgactactgcgtagtcaagcaaagcggctccgatctgctcgtcaaggtcaattacaacggtatgaaaggattgtacgaccacacgggcacccataccgcgaagttcatcgccatcgactctgaaggccgtcgctcctacacgacgatgaccatcaaggtcacccacgacagcggcaccgcagagggaccgaacatcttctggagcaccaatccggaaggtacggatatcgtcgatatcgactcccgccacacgctcacggaggagggtatgaacgtcttcatcaacctcgcctccgagagcggaataaccggcctgacggtcgatatcatcagcgatgccctcaccgccgaagtcctcgaaagcctcggtatcggcttggaagcacatatggatctggtcaatccggcttccgacaaaatggacgaaggactccactcgttagggttcaagaccaaagacgaaatcgtcggacagaaaaccctgcaattcgacatttctcagtttatgacgatgctctatgccgtagctccgggcaacacggacttcaaattgaccgcaacggatgcttcgggacagaacatcaagtccatcatgctctatgttccccaacagtaaaccgcaacagagatgaaaaagattcttaaatatatttcgctgcttgcaggcgtggccttcctgaccgcagcctgctcgcagagcgacatcgacggcaacgcctcggaagagatgggaaccctgcgcctaagcgtcaatatcggcggctcgcgtgccgacgcatacaacgctctggatcggagtatcatgcgcgtctataagatcgaaaacggagaagagaagctgatccgcaaataccagccggctacggaagctccgggtgatttctacctggtagcagggtcctaccgtatcaaagtggaagcaggagaccagagccaggcgaccttcaccaacaagagttattacggcgaattggacgtcgatatcgaaccccaacagaccgtcctcaaagaggtagtctgcccaaccaccaacatcggcgtcaaagtcgtcttcgatcagacgattctggacaaaatggatccgggattcaaggcttacgtcagcgccatcgacaccttctccaaaacggaagcagaaaacggctcggtaccgacgctcaaatacaccgagaacgcaacgggttattacctgctgcccgaagatgttcacaacctgagttggggcttttacagctcgagcacggagttaggcagcgtttctaaaaccggagtcattccgacacccgaaagcggcaatctttatacgctgacattcaagtattcgaagactccgaacggctacctgggcatcaccgtacaagtcgatgaggacggagagatccacgaagatcccttcatcttcagcccgcagccgacgatcaagggcgacggattcgacatcaactcggtaatcggattcaatacggacgacatttcgttcgcagtatcctcggtacaggcgctttcgggcatctccatcaaggccaacgacgaaacgatccaggtgttgagcgacggcgcgctgcttccggaagccgcagccaaaggcatcagctacaccaagaccgacgacaacagcggcaaactctccctcggcggaaccttcttctccacgttcgccggcggcattcacgaagtagaatttacgatgaccgacgtcgcacaagccgaaggtacgggcaaagcccgcatcgcaacacccggactcaccgacctggcggtgtacgacctctggctcaatacggccgattttcaggcaatcgtcaccgatccggcgctcaccaacgtcaaagtacgttaccgcgaacgcgaacgcctggcggagtcgcccgccttcggtgagtggaagaccgtaaccgccgttgcgggtgccgactatacctatacggcacaagccatcgacttcgccgcagaccgcgattacgaataccagttgctcatcaacgatgcggaaacgggcgaggtacacaatttctcggccgcaacgggcattcagcttcccaatgcgggattcgaaacctggacgaacagcaaaacctggtacccctgctcggcggacgaaatcggctcgaacggcatgggtacgggctataccggattctggggtacgggtaaccccggtgccaatgccgccggtatcgtggtgaccgaacccgcagacgatccccgtccgggatcgaccgggagcaagtccgccctgctcaagacccagagcgctttcggcgtaatcgctgccggcaacctcttcatcggagccttcggcggtgttcacaacatcactaaaggcgatgtgtatatgggtcgtccgttcaccttcaacgcccgtcccaaagcgatcacattctggtacaaagggacggtcgggtccggcgacaaggcccgcttcttcgtctgcatgggcaaatggagctcctaccacaagatcgacacaaacgaccagagcaccttcttcgatccttcccaggaaagcctgcccgaaggccccatctacggccacggggactggctcaacgatacctcccaaagcgattggaaaaagatcgtaattcccatcgaataccgcagtgatgaaaagcccaattacctgatggtaacagcctcggcgagctaccgcggtgactacatggaagggaacaaggagagcagaatgtatatcgacgacatcgaatttgtatattgattttcatgcgaggaaccgtcgccatcctgacactgacactgtcactgtgtctatgttttgcaagcaatcaatcgcaggccgctccgggacctgcgattgattcggcaataccgcaacccgattcttcggaaaccgtgaacacgggctccgaaagccctcggcccgaacatccgcttcgaaccgatgcacaatcgcctgctccgatggaatccgccccggggcgtaaggccgatcctcgcgcagaacggggcctgacttccatgtccaaccagttcgtcccccggggacaatggattttcggagcctccgcctcctattccacccacacgaacaaagattacacgtttctggtaatcgaagatatcaactcagacggctacaccttcaaagtcacccccctgatcgcctacgcgatccgggacaacatggctatcggcgtcaaattcatctattcccgctcgttgctccgcatagatagcggcagcatcaaactgggcagcgacatcgacctcggtgtcgatttctacaacgcactgcaacacaactactccggagctttcatctggcgtcagtacatccctctgggacaaaacaagcgcttcgccctgttcaacgaaaccagcctgacattgggcggcggccaatcccggttcgctgcggactccccgatccggggcacttacgaaaccaatttctccgcctcgatcggcatatcgcccggcctggtagccttcgcgaccaacaacctggctttcgaagtcaatatcggcgtaatgggtctttcctacacccgaacacgccaagtacacaaccaggtaaccgtcggaaagcgaacttcgagcctgatgaatttcaaggtcaatatcctgtcgatcggactgggagtatctttctatctataacgcggaaatacgatgaaacgactgatttttaccatactgatagccgtcgcaacggtttccatgctccgagcccaggaaccgacattcccgggggcacttccgtcttcccgcctgcaggacagcctctccgccactccggttccgacgaccgtccctgtcatcgaggaacttccggccccgacgttctacgccgatctgagcgactcgtccgcatcgatgccgacctcggtctccccggtacgtcggaaacaacgattcctgccgatgaaacggagaatcgaccgcgaaatcaacaaaatcaaattcgcctacgcaggtgaaatcgccctgggcctcaccgtatcttacggcaccctctcaagcgacgacacggactacctgctgatcctggacaacctgaatctgaacggcagtatcttcaccatcaacccctccgtaggctacttcttcaaggacaacatgtcggccggcgtccgtttcggatacaccaacatcaacggaacgctggatacgggcaacttcaatctgggagagcaaaacgacgtcaatctggccttcaaaaacctccacctgcaaagcagtgcactgtcggtcggcctctatttccgctcctatgcgggattggacagcaaaggacacttcgggcttttcggtgaagtagatctttcgatgaagaccggtaattcggagtttacctacgaaaccgaaggcaccctcagaagcacgttcagcgacgacctgaaactgtcgctcgggttcaacccgggtctggcggtttatatcttcccgaacgtgtgcagcaccatttccttcggactgggcggtatcgaatacaccaagatcaaacagaaagatgccgacggcaacgagatcgggcaacgaaccgcttcgaaaatgcggttccggctcaacctgctcaatatccgcatcggcgttaccgttcatctatggaacaagaaagccaacaaagcatgatgaaacatctccgacatatacttatcggcatactcctgctgctgacctcctgcatcgaaaattcgattccttatccggtcgtcacgctgcaaatcctcggtgtcgaaggcgaaggtttcacctgcgcacccgaagatatcaatacccaggaacgaatcgtcacacttcatctggacgaacaaaccgacatctccaacgtaaagatcgacaaaatatcggtcaccgaaaatgcccggtcgtcgaaacccctttcggggacattcgacctgcggactccgctctacatcaccctttcgttttatcaggattacgaatggacgatcgtagcggaccagcagatcgaacgttatttcgaagtcgaatcgcagatcggcgctgcggaaatcgacgtcgatcaacttacggcgaaagcatacgttccggaagggaccgatttgagcgacctcaaggtcacacggctgaaactcggcccggcggacattaccacgatgacacctccgatcgacgagctgacttcgttcgaatcggtccgctacgtttacgtcgcttaccacgacttcgaagagaaatggtcgctttacgtcgaagctaccgataccaaggtacgcttcacgcaggtcgatgcctggagcggggtcatctgggcctatgccgaaggcaacagcgcggacgaactgggattccgttatcgcaagaccggcgacgaggcgtggaccgaagtcgataaggagcaaatcaacatctcgggcggtgcattcgacacctgtatcacgggacttaccccggaaacccaatacgaagtagtcgcctactccggcagcgacgaaacagaggtggcgagcgtcacgaccgaagcggcaccgcaactcccgaacggaggtttcgaagagtgggaaacgatcgacaaagtcgtctatccctacctggccgacggcattcacttctggaattcaggcaacaaaggcgccagcatcggcaacgctactccgaccgacaagacgacggacgtgcgtcccggcacatcgggcatctatgccgcacagctttcgtcgaagctcgcaggtctggtcggcgtttacaaattggccgccggcaatctctttacaggcatattctacggaatccgaaatctcacgcacggtatcgtctgcttcggacaacctttcgaagcccgtccgacggctctgcacggctggttcaaatacaaccagggaatgctgaccaacgtgggcagcacccagccgccggggatgaacctcaaggtcggcgatcccgacaacggcatgatctacatcgccgtcggcacctggaccccggaagagtacggcatctcgcagggagaacagttcggatcggccgaaaacccgattgcgatcgacacccgcaaccccagttcgttcttcgatccgacgagtccggccgtaatcggctacggacaactgccgctcaccgccagctactccgaatggcaggagtttaccataccgctgaagtacgtggcgacagaccgcaaaccgacccatatcgtcgtcgtctgctcggcttcccgttggggcgactatttcatcggaagcacctcgagcgtgctcgtcgtcgatgacctcgaactgatttacgaccggctggacaaaaccggtgaataggtatattcgccgtcagactatccctccgatcggatacgaacgacgaaaaccaaacgctgaatccgcagcgctttccaacaaaaaagcagggaatcactccctgcttttttgttctgttatcggacttaccctctcggcgccctccggatcagagctgcgcgatccggcaatacttattataacgattcattacgtcctgcacgaaagcccgcgtctgacggtagccggtaaatttgccgcacttcacgacctcgtgctggtaataggcgggatcggacttgagttccaggtagcggagcaccacctcccaggaattggggtcttcgccgttcacacgggccagccgccgggcatcattgacatgaccgattccaccgttgtagcaggccaggatcaggctcattcggtctttctcggaaattcccgccggcaggtcgagcgtcgaatcgatccgattccacactttattggccagcaatacattggtttccggatcgagcaaggcttcttccgaggctacgtcgaactgccgggccactgcaggcatgatctgcatcagccccctcgctccacggcgggaaactatatcggctttgaaacgcgactcgtgataggcaatagcactcatcaggcgccagtcgttcccctcccgctcgctgatattccgaattacgtgatcgtaaggagagatcacataccgggcttccattttctcctccagggtaatccccgcttcggacgacgtcgaaaaatcggcgttgaatccgtaaaaagtggtctgtaatgttaaaaatacgaaaattaaacaggttttctttaacataaaacttgcttttgcaggcagcttcctgtgccgtacagtacgctaatcatagaaaccccacgagatacccatcttaaacatgcccggattgagcgggtacttcgcaatcgcgaaatattcgccgtttccgaacaggccccggttgatatgctgatatttcaggaatatccgcattctcttccacttgcccatcaggaaaagatccagataggggtaattccccacctcgatttcccgctgattgaagaactccgagagcgcaggattgtagccgggcgcatagtagcgcgtattgaaatggccatcgacaccgaactgcacccggagcacgtcgcgcaccgcccaaaactcgtaataatacgagaggaaggcgctgacgagcggaacgggtatgacactatgattcgtactccactgcaacaaaaccttatggtccaaatgaagtccggcgatccggaaatctttgcgggcgtacacgctcgtcacgctgacgcttccgttgtcctgcgttatctggctgtcggcgccgtaataaatcttatcggtgacaatgccttgccacacaccgacctcgaacgcataatcggggacacggaaagcaacttcgaaacgagtttcattctccttgcgcaaaggagtcaaccacacgtagtggttagagaatagattctcctgccagtaatccggcgaacgcgtttccatacggaaacgcccttcgagaatcaggggacgtttgcggatatatcccgtcagggtcaggttggccccgaacgaaacgtcaccgccgcgatatcccgacgggtagaacttggcgtcagctccccaatcgacatatttcttgatctttccttcgaccgatccatacacgaagtaactgcttttatccaccttgtcgtacttaccgttcaggtaggaatccaacctgaactgcgaataggtgtgcaggtcgagtcctacacctccgttcaccgtaccgaccacgccgttacgatcccagggctgcgcctgaatgaacacccggttggaaatcacccgctcatagatcgagtcgcgcgtctgcgtgggattgatgaaccagttcttgtaatattcgagtccatcctgcggcacaaaattaccatctgcatctcgctcgtaacggtcgtcggtataggttccccgaatatccttataaaccttgctccaggagttgtactcgaacgaatgaccgatgaatacggccggcagattggcgatcgaaaagtcgctttcggtaaccggcagcaacggaataccgtacgactgttcgacgaaaaacgcattgttgcggtatatgttggtagcctgcgagctcgtcagtctcatcggcacgcccgacggcatttcgaaagtcgtatcccggatcgcccattcacccaccacgccgccgttctcacgcgtctcgatgtggttgttgatgaatccggcatgcaccgaataacgctttcccgtatgcgaaacggcgaccgaaaggttgtggttcttggtacgggaccactcgtaaaggcccttggtaccgcgcgaccgataattgacgttgaagcccgtagtcggcgaaatattatgccccagcgtcaggctgaaattctcctcccggaacttcttctgtccagactcaaggtacatgaagtgaaaatacggccgtttgaggttgtagaaggggacgttttccatgcgataggtatagacatcgaacccttcggcaaaagagaagttgcggtattggggacgttcaaaatagttgtacggcaacgaagcctgtcccaacgcacccacggcagcatggccgacgccttccttataaaacgggtagtcgatgcggaaagtggcgagggtggtatcgagcggattgatatgcacctggttgtagtcccgcgagatcgtccacgaaaagttgggcagcgcacggatcgaatcgttgaaaaaataggattcgagaggctttcgaatccgctttttcttggtcgaatcggtcggcatggcgggttgttcctcgccgttctgcgtctggaacgggttgctgccgagcatattgttcggattattcgggtcgttcggattctgattgttctgatttcgcaggatcgcgctggcgtcgaattgagcggatgcctccaacgtcggaaaggccaacagccctccccacagcaaaatccacagaatttttttcaacaccttcggaaacatcggaatacgtacgcgcaaatcgcggcaaagatagtaaaaaatcaggctttcggtgctttatcgggatttcccgagcgcatgcagagccagcgaaccgccgacacgacgatatataaaacgataattaccgggatagcgtatgtacgaagtataattatcaacacgatactcgccagcagaaagaggtatcgcacctcgtttccgcgccaaccgaagccgtggaacttgagagcgaacatgcggatcggagaaacgaggagcagggaggtcagcacggcgatcagcaacaccccgtccgaagaaagagcgaccgccccctgctgccacagcatgccgagcgaagcgcagagaagcgatccggcgggcgtcggaagtccgcagaattcgaccgtctgcgtttcgtcgatgttgaacttggccagacgcagcgcagaaaacgccgccaggacgaacacgccatacccgagcttccaggtctccggcagccagcaaggttcggtctgcaggcaaacctgccagagcactgcggcaggagccagtcccgaagtaatgacatccgccaacgaatcgagctgcaccccgatcgccgaagacgaatgcaacagacgggccacgaaaccatcgaaaaaatcgaacacgattcccgcgactatcagccagaaagcgagcgtcaaatcattgtacatcagtgctaccacgacggcaaacgacccgcagagcagattcatgagggtcaataaattcggtatcgtgaaaagtcgtatccgcatttgtaaaagaattagtccacctattaagtaggcaaatataggaaaaatccatcggttacacgcacacgaccgtcgtaaaatgcacatcgggaaaattatcggaagctattttccccctcgacatccatattttttaattaaaatttgcataaaagaaaaattaaatatatctttatttttgtaaaagattgcgctattagtaaaaatgtactacggataaattttcaggaggtgcggaaaatacgatacaacacctaatcattagaaccttatttacaaaccttaaccaaaaacatgtatgaaaaaatttaatttgttgatggcgcttatgatggtattcgcactatcgtttgccgcttgtaatgatgatgaagagcaaattccccctaccgatggtggtaatttgactttcgaggtaacggttggcgagattacctcatcctccattgcctacactgtaactccctccgaccttaaggccgagtacctgtgcatattggccgatgccaaaacagtcgagtcgtttactcgcgatgaatttctcgtggaggccatcttggaggagcttaaggctgaagccggcgcacagggcaagactttagcagagtatatgcctgaaatcgttgataagggggctatcactaatggcaagttctcgaatctgtccccggcgtccaaatactacatcatcctgttcggagtagatccggccaacggatataaggctaactctgacgtagttaagaaagacgttacgactgaagagttccaggatctcaacataacattcgaggttgagacgactgtggacggcaactctgcaacattcaaaatcaccccttcgaacaacgatgacgtgtggtacttcaccactcttcccaaagccacttacgacgcatacaccgatcctgccggtcaatacaagatggaaacacggcaattcatgctcttctgtctccagcaggaaatcgaagcccggcgtcagcaaggcatgtcggatactgaaattatgaatgcgatcttccacaagggggctttggaactcgaaggcaagggacttaccgccaacacggagtatatcaaccaaatcgcaggctttatcataactccggaaggtcaggtgaccatcgctaccgatgttacaacaaccacctataccaccggtaatgcccaggcccaagattttactttcgaaattaccgttggtgaggtcgaggctatgaatgccgctatcaagatcgttccgacagatgaaaccgctaccttctgctggatggtggctccgtgggatgggcagaagacagctacggaggttatggacgacatcgtagcacaatatggcaactttatgaacaacggagccatgctatataaaggcgttcaggattacacgggcggccccggcagcccgtataaatacaaactcgatgctgccgataccgactactacgtcattgccttcggctatgccggcggtgtaactacagcccctgtgatggagactttccgctcccttgcggctccggatccggaatcgaccaccttccagataactgcttccgacatttccccttatggtttctctgcagaggtaacaccatccgagactaccacatactatacggtgggattcatgccaacagaagagtttaagactttggattttgaccaacttaccgcaaatataaacgcaaatttcgacgagatgttcgcaatgtcacagatgtttgatcctaacactactgttgctcaagttcttagtacatattattataaaggtgttttcactgtcgatgcttcagaattgactcctgaaacagcttgctccggctttgtagcagcactctctgcagaaacaggccatgttgtcaaaattcacaagtttgaaaacatcgcaactaccggcaaactcggcaacattaatccttccattgagcttatcggctactggtcaggagacgacgaggccggtcaaatctttgggcaaccagacgcaacgagaggtaaagctatcactgtcgtcaagtatagcggcttcaatagcgcacggaaactatttgcactaatgtggtatgacgaaatgacaaatgtcgatcaataccctgatgcatccctttggagtcagttgaaagcaaattggctggaaatcgatcagtcacagccgtactcattctatgttgttgaatgggagactccgcagacagcatttgcctatgcagaagataacgatggcaacccgggtacttttggtcgtctcttcactcgcgcaaccgcagagaacaagggtaatattcaggatttgatcgatcttgttgagaagctcaacgcgacatcgaagagttcttttacactacccaagtccggtataatcggcaagaataccggtattacacgcaatgacaagaatattaaagcaaatactcctgtcgcaaacgtagtcaagaacgaggtagaagttgttgagcccaagccattcgcatcatcttacaatgtgtcatacgtgcggcctttctatttgtaattttatatagaactgaatgtttgatagttcgtctggcgggttcgccagacgaactattttctgtatgaacggtcaatacaaatacaatatgtatgctatttatccctaatccgacaaatcatactatatttgtaaaagcgtaagaacacgtccctgaaaactgcaaatacaccgttttcttctcggctcgcactgtatttaatcgtaaaaattcatcgattatccccacgaatcgaatcgtcatcctcggggccacttccggcatcggactggagatcgcaaaactgtatatcgcggccggcgggcaggtcgtcgcggcagacgggaacccccttacagagttgatccgccgatactatcccgacgccaaaaccatcgcctccgtcctgcccgaagcacacgccactatcaaccccgacacggtggacgacgcccggaagctgatcgatatcgacctgggcataatcgacggttgtttcggtgtggcggaaaacggcgcggtatggatccggcaggacatccgccacaaagccctctatttcggtgccacggccctgatgatcctcatcccgcgcgatgcgctggtcgatacgatgcacgaggctctcgcccgaccggaattggacgacttcgaatacggatgcttcatgtccggaccgtcgaaaaccgcagatatcgaacaggccctggtcttcggggcgcacggtccgatgtcgatcaccgtcgtactgcggtaaaccgcatctctcgactccacgtccactatccggcactttttcccaagtgccggatagttcgttgtacgattcgtccgtatcatccgtaaaatttccctggccgacaaatatccgcatttcaaaaacataccgaacaatatttaattttcatccgagaataattttagctatctttgtctaatggatcgatccggcgatgccggccgtaaattctgaaatcattcaaaaacaaaccgcagcgacaactcatcatggacaaacatacctattgcgtcatcatggccggcggcatcggcagccgcttctggcccaaaagccgccaatccaagcccaagcaattcctcgatatcctcggcaccggcaagtcgtttatacgcatgacgtacgagcgtttcgaaaaactggctccggctgaaaatttcctggtcgtgaccaacgcccgctacaaagacctcgtgctggaacaaatcccggaactcgggccggaacaggtactctgcgaacccgtcggacgcaacacggctccctgcatctgttatgcagcctacggactgcagaagcgcgatccgggagcgaagatgatcgtcaccccggcggatcacctgatcctcaacgaggaggatttccgcgccatcatcggcgaatgcctcgacttcatcgacgaccgggcggctctgatgaccgtcggcatcaagcccacccgtccggaaacgggctacggctatatccaggtatcggacgaccggaccatcagcaaggtcaagtgtttcaccgaaaaacccaacctggagctggcgcagacgttcctgcaatgcggcgaatttctctggaactccggcatcttcgtctggaaagtcggcgacatcatcgaagcggtgcgcacctacctgcccgagcaccacgccctcttctcggacatccagccggtattgggcacttcagaagaagcggaagccatcgcccgggtattctccgaatgccgctccatctcgatcgactacggcgtgatggagaaggcgaacaacgtctatgtacgccgcggagagttcggctggagcgacgtggggacctggggctcgctctaccagcacgcccgcaaggaccgttacgccaacgccaaacccgagaagggatgctatacggacgaaaatacccgcagttgcatcgtctccctcccggaaggcaaagtagccgtcatcaacggcctgaaggagtacatcgtggtggatacggaggacgtgctgctgatctgtccgcgcagcgaggaacagaacatcaagaagttcatcgacgaagtgaaatacaacgaaggcgacaaacatatttaagggccacaacatttccgctccgacgcgggttccggagccgccgggatttccgaaaaggcaaatgcccctcgccgggcttcccatcggcaagcgttccgctcttcttttggacaaggaaaacatgaccaaatattcgatttccccgatgtcatccctgtatgaactgtatctgcgccatccgcgcatttcgacggactcccgccgtatcgagcccgactccgtattcttcgcactccggggggcgtcgttcgacggcaaccgcttcgcagccgacgccctcgaaaagggggcggcatacgccgtcgtggacgatccctcgctcccgaacacccgccccgacaaggcagaccgtctgatcgtcgtggacgacgcactgcaaaccttgcaaaccctcgcccgggaacaccgccgggagttggggctgccgatcctcgccatcacgggcagcaacggcaaaaccaccacgaaggagctggtcagccgcgtactggccgagaaatacgaagtctatgccacccggggcaacctgaacaaccacatcggcgtaccgctgaccctgttggcaatgacccgcgacgtggagttcggcatcgtggagatgggtgcgagcgcgtgcggggagatcgccctgctctgctcgatcgcggaacccaactacggcatcgtcaccaacatcggacgagcccacctggaaggcttcggcggcccggagggtgtccggcgcgggaaaggcgagctgtacgactggctcgcccggaccggagggcgcgttttcgttcctgccaacgacccggtcctgatgtccatggcggccgaacgcgaaacgctggctgcggagtgttacccgaccacgctggccgacggcgtggagcaccacctcgaaggggactacaaccgcttcaacgtcgctgcggcggtcgccgtcgggcgttatttcggcgtggacgacgaacgcatccgctatgccgtaggctcctatcggcccgacaaccaccgctcacaaaaaatacgcaccgggcagaataccctgattctcgactgttacaacgccaatccctcgagcatgcaggcatcgctcgtcaacttccggcaggaaccgctcgaaagctgcacccggaagatactgatcctcggcgatatgctggaactgggcgactggtcggatgcggaacaccgccatatcatctccctcgccgccgaaattcccgatgcccgtatcttgctggtcggaccgcatttcgcaaaggcttaccgcagtctggaatcccgacccgccgacacgactctctacccgtcgcaggaggcactggccgcagagctccggaaacatcccgtatcgcaggccctgatcctggtcaaaggatcgcacagcatcgggctggagaggctcgccgatctcctgtaacgattcgattgacaaacacagcgaccatgaaaacattcagatacctcatcgccggactgctgttgcttgcggcgcttccctcccagtccaaagaggaggaaatctctgtttcccgttcctggggcaaactctccggaacgctgaccgtacccgacgaaggaagcgacgcagcggtgctgatcatcgccggctcgggaccgaccgaccgcaacggcaacagcggctcgggcctgataaccaacacctactacatgctcgcccgtgcgctcgaaaaagagggaatcgcctcgctccgctacgacaaacagggcatcggaggcagccgttaccgggatccggaactttacaaacaggaagaccggctgcgcctggccgactacatcgccgacgccgaagccctgacggattacctcaaggagcgcggcttccgaaaaatcatccttgccgggcacagcgaaggttcgctcgtcgcattggtcgcagcgaccgaatcgcccgacgtcgcggccgtcatctcgctggcgggagccggctacccgatcgacgaaatcctgcaattccagcttacccgcgaactgatctcctacaatcccggactcatcctcaacgtacagtccatcctctcccggctcaaacaagggaaaacgaccgaagatattcccgcaattttacaaggtatcttccgaccttccgtacagccttacctgatctcgtggatgcaatacgatccgcgcgaagtgatccggcaggtaaaacagccggtcctgatcgtcaatggcgacaacgacatccagatatccgccgacaatgccgaagctctggcccaagcccggcccgacgccgacaaagtcatcatcgaagggatgacccacctgctgaaacagagcgaagtgaccgatcctcaacggcaaaaaacgactatttatatggatgctgccgcgcctgtttccgaaaagttagtgtcggtcatggcggatttcatccgccggatatgaccttctgccggcgcagcgaaacgccggctccgacccagggattccgcgccatcgcatgccgccgggcgataatcatcttttcgacgaccggaaccgaaaaatgccccggcaatacgaattgccgcatttttaggagccattgcgtttgattttctgaaagaaaaacctacttttgtaagttgcctcgaaattttaacgaaaacctacatacgcaatggaacaaaccaaaccctctcaatctctgcccgacaacgcgtaccgcgaactcaaaccgggcgaagagtacgtcccgatgatgccggccgacgccaagccgaaggaggtcactccctattcggttacgatgggcctgctgatggccgttctcttctccgccgccgcagcctatctgggcctgcgcatcggccaggtgttcgaagcagccataccgatcgccattatcgccgtaggcgtcggcaacatgctgggcaaaaaaaacatgctgggacagaacgtcatcatacagtcgatcggcgcctcgtcgggcatcatcgtcgccggagcgatcttcaccctgccggcgctctacatcctcggtttggaaaccgcattctacaaagtattcctctcgtcggtactgggcggtatcctgggcatcgtgctgctcatccccttccgcaaatatttcgtcaaggagatgcacggcaagtaccccttcccggaggcaacggccacgaccgaagtgctcgtatcgggcgaaaaaggcggcaatcaggccaagctgctggccgtagccgggctggtgggcggtctgtacgacttcgcagcgagcaccttcggcctctggacggaggagatctcgacccgcatgacggcttggggcaccctctgcgccgataagttcaaaaccctgctcaaagtcaacacgagcgctgcggtgctcggcctgggctatatcatcggactgaaatattcggccatcatcgccgccggttcgttcctgatctggctgctcgtcgttccggtggtcggttcgaccgccacgggcgcaggcatgtcccctgaagagctataccagaccttcggtcgtccgctgggtatcggcggcatcgccatggccgggcttatcggcatcatccgtcagagcggcatcatcaaacaggcgatggggctcgccgtcagcgagttttcgggcaagaaaaaagccgaaacgaacgtacctcgcacccagcgcgacctgaccatgcgcacgattctcactacgttgatcgcggcgctcgccaccaccttcttctttttccagttcggcattctgggcaactgggggcagacggccgtggcgctgctgatcgtcttcgtcatctcgttccttttcacgacggtcgcagccaacgccatcgccatcgtcggcagcaaccccgtttcgggtatgaccctcatgacgctgatcctcgcttcgctggtactcgtaagcatcggcctgaacggtacggccggcatgaccgccgcgctgattatcggcggcgtggtctgcacggccctctcgaccgccggcggcttcatcaccgacctgaagatcggctactggatcggcaccacgccgaaaaaacaggagagttggaaattcctcggcgtcttcgtttcggccgctaccgtcgcaggcgtgatgattattctgaacaaaacctatggcttcggtcccggcagcccgctggaagctccgcaggccaacgcgatggccgccgtgatccaacccctgatgcagggcggaacagctccctgggtactctatttctgtggcgcagtcctcgcgctggtactcaccggcatcggtattccggcccttccgttcgctctgggcatgttcctgcccctacagctcaatcttccgctgctgatcggcggtctgatcgcctggttcgtatcgacccgatcgaaagaccaggcgctcaacaaggcacgcatgagccagggtacgctcatcgcgtcgggcttcatcgcaggcggcgccctgatgggcgtagtgggagcgatcctgaaattcgccgacgtggactggaaattcacgcagtggagcaattcgaacgcagcctcgtgggtaggtctgggcatgtatctggcgcttatcatctatttcgccgtacattcgctccgcgctaaaaaggaagaataaaaaatcaacgaaatatactatggaactcaaagacagatttctgaaatacgtttcgttcgacacccagagcgacgagtcgagcgaaactttcccctcgaccgcgaaacagcgggtgctgctcgattatctggccgaagagatgaagaccctgggcctcaccgaagttacggtggacaagtacggctacgccatgggtacgattcccgcgacgcccggctgcgaaaaagcccccgtcatcggattcatcgcccacgtggacacggcgcccgatatgagtggcgccgacgtgaaacctcacgtcatagagaattacgacggcaaggacatccggctgaacgccggcgtgacgatgaaagtcgcggactttccggagttgagtttcttcaagggacatacgctgatccacacggacggcacgacgctgctgggcgccgacgacaaggcgggcgtggcggagatcatgaccgctgcagagtatatgctctcgcacccggagatccgacacggtaagatccgcataggcttcacccccgacgaagagatcggccggggtgtggacttcttcgacgtcaaggccttcggcgccgacttcgcctacacgatggacggcggcttcgagggggaactcgaatacgagaacttcaacgccgcgagcgccaagatcgagatccagggccgcaacgtccacccgggctacgccaaagacaagatgatcaacgccattcaggtagcatgcgagctgaacgccctactgccggcctgggagcgacccgaacacaccgaaggctacgacggcttctaccactgtatcgccctcaacggcacggtcgatcaggcgcagatcagctacatcgtccgcgaccacgacagcgcccgtttcgaagcccgcaagaactacatgcaggagtgcgtcgatctgctcgcccgcaaatacggcgaaggggtgctgaccctcacgctcaaggattcgtactacaacatgcgcaagatggtcgaaccgcacccgcaggtgatcgacaaggcgatcgaggcgatgaaaatggcgggggtcgaaccgctcgtgaagcccatccgaggcggcacggacggcgcacggctctccttcatgggactcccctgccccaacatcttcaccggcggcatgaatttccacggccgttacgaatattgctcgctgacgaccatgcacaaagccatgcaggtaatcctgaacctggcccagctctggacaaaataaaaatattgcacaacaagcgttttcgacaggcggacacgaagccgaatccgttcggaccatgccgagcgaaaaaaacgcaaaaaaacaaaccgagagtttttccgatacccggaccgtacgaagatgttcgatacgcttcggaacagaaaacgaagaaaataaaccggcaaaaatcgtatgaacagatttggttttctgaaagtagcagcggcagttccccatgtacggatcgccgattgcgactataacgcccaacatatcaccgaattgatccgcaagggcgccgaccggggagcaagcatcatcctcttcccggaactctgcatcacctcctatacctgcggcgatctgatccagcaacccgccttgctccatgcggcggaacaggccttgggctatatcctcgcccagacccgcgaactgcccatcgtcgccatcgtcggtatgcccgtcacctatggcaacgccctctacaactgcgcggtagttttcgctcagggacgtattcacggcgtggtccccaagacatatattcccaattactcggaattttacgaggcccgctgcttcatgtcgggcgaagagatcggcctggccacgatccggatgtgcggccaggataccgatttcggccgcaacatgcttttcaacatcggaggcgtgaagttcggcgtggaaatctgcgaggatatgtgggttccggccgccccgtcgctgcatcaggcagtggacggcgcccagatacttttcaacctctcggcatcgcccgaagtgctgggcaagcacaactacctgctcacgctggtcaaatcgcaatcggcccggacccagtcggcctacatctactgttcggccggttacggagaatcttcgaccgacctggtattcggcggcaacggcctgatcgtcgagagcggccggatgctgcggcgcaccgaacggttttcgaccgaggaacagttgatcgtcgcggacatagacaccgaaaagctcctcaactcgcgccgccgcaccacgactttcgcgccgcaccgtcccgccgagcgcatcatcgtcgaaattcccctgccggaaaaccccgcgaacgtcaccctcgaccgggagttcagttcccatcctttcgtgccgcaaacgcccgaagagatggacgaatcgggtcgtgaaatcatcaacattcagacgatggggctggcccagcgcctgcagcataccgattgcaaaaaggtcgtcatcggggtttccggcggcttggactccacactggccctgctgatcgccgtgcggactttcgatcgcctcgggctcgaccgcaaaggcatcatcggcgtcacaatgcccggattcggcaccagcaaccgcacctaccgcaactcgatcgccctgatgcgctgcctgggcatcacttcccgcgaaatttccatccgcaaagcctgcgaacaacacttcgccgatatcggactcaaccccgaagaacaatcttccgcctacgaaaacgcccaggcccgggagcggacacaaatcctgatggacatcgccaacatggagcacggcatggtcctcggcacgggcgacctgagcgaactggcactgggctgggcgacctacaatggcgaccagatgtcgatgtacggtctgaacgcctcgctgcccaaaaccctgatccaggtgcttctacgatggatggcccaggtatgtcaggacgatgcgatccgcgagattctgctcgatgtagtcgccacgccgatcagccccgagctgctgccatccagcgaagaaggaggaatcgcccagcacaccgagaagctggtagggccctacgagttgcacgactttttcctctaccacttcatccagaacggttactcccccgccaagattctcttcgctgcggaaaaagcgttcgacggacgctacgaccgggcgacgatcctgcgctggatgcgggtattcttccagcgattcttctcgcagcagttcaaacgctcggccatgcccgacggtccgaaagtaggcatcatctccctctcgccgcgcggcgactggcgtatgccttcggacgctacggcaagcctgtggttgcgggaaatcgatcttctgattcaggaaaaataaaacagctcttgctattcggctatgaaaaaattgcttattctcgcggtattgctcataggttgcagcacacttcaggcccaagactggaaagacgccctctccaaagcggcgaccagtgccgcagataaagtcacgggaggaaaactgacccaaatggctattacgggccggtgggaatactccggtccgggcgtcaaattcgaaagcgacgacaccttgagcgagttgggcggctcggctctttcgagtagcgtcgagaaaaaactcgacccggtttaccaactggcgggaatcaaacccggagcctgtcatttcacgttcgatacggacggtgctttcgaagcgctgttaggaacccattccctgaacggaacctacgaattcaaccccgaaacacatgccattacgctccacttcagcaaagcaccgggcaaactgggttccctgaccggccatgcctacctgagcggctcacagatgcagctggtctttccgagcgaaaaactcatggagctgctctcgggaatcggagcaaaaatcgcatcgctgcaacccctgacagcttcgctcgaaaaatacaagagtatcgccatcgggttcaatttttccaaataatatcattcggatatgaaacgtacattatgtctgtccgccttgttcgtcgtatgcgcgacaatcgctgtttcgggacaatcgctgaatgaaaaactccagcaacttttaggaggtagtcactccgcgaaacaggaagaggccacaccgccgacctatccgtcggaagaagcgctcctcggagtctggacctaccaggctcccagcatcgaatacaagggcgacgatatgttcgcctcgatcgccgtagccggattgcaagaccagttggcgacccattacgtcaaggcaggcctcgtaccgggacaggggaccgtttccttcaaaaaacgcaaccggctccacgcctctatgggcggacatgagatcgacgggacgtatagctacgatcccgccaccggaacagccgccatcacgctgatccaagacgggaaacaagccaccttccaaggctatctctccctgcgcggcgaggtgctgacgctccagttcgatgcaggcgatgcgctcgaagccgtgcggcactcctctccggaatacgctgcgaacgagaaaatgcagcaaatcgcctccgtcatgcaaaattatcccggcatcatgctgggcggacagttgaaaaaataggcaacccgtaatattaaaacggggctgtgtcgaaatgaaaatttcaggcacaacccctgaataaggggtgtcagaatggatgcaagacaaggcatttgcgggtaagagcgacaggaatttactatcgtaaatgactttgccgcatcccgataataaaacagcagtgtgtcataaagacacactgccttatttttctattaccagttgaacaaaccgacgcctgcggcgacgataaaaccggttgcgaatcccgccgccacttgcgacagcgtatgataccccagtttcagccgggcggagccgagcgcaccggcagcgagcagggctgcgataaacgcagcgaagagtcccccgccgctggcgatattgatcagaacgataaaagccacggcagcacccaacgccgtcatatgcaggctgatcttccaataaaagctgacaaacagacacacggcgacacaacaggctcccgcaaacataaaacggctcaacatctgcgccgaaggaatcctcgcaatagcgacggcgcacaacgtatagcaggcgatcatagcgagcagcgggatgaagcgttccttgcggtcgctcaaatccgcatcgccgatcttacgatacgacttgagcagtgcgatcaccaaaaccggaatgatcgtcgtaaaaagcagcgtcacccaaataaggtatatcttgaccttgagcggataaagcgaatagaccgtaccggccagcaacagcagcaacaccatatagagcggcaccaggaacggatgcagcacaacggaaacggctttcgacaaacgcaaatacatcttctacgcgattaaatctgtttacggagccgtgccaccggaatactcaacatctcccgatacttggccaccgtacgacgtgcgatgcggtaccccttcgaattgaggatatccatcaatgtttcatcggtcagaggcttgcgtttatcctcctcgtcgatgcactgctggaggatattcttgatttcatagctcgacacttcctcgccgctgtcggtctgcatcgcctccgagaagagcgacttgagcagaatgatgccgaactgggtctgtacatatttgctgttcaccacgcgcgaaatggtcgatacgtccaaccccgtgcgatcggcgatatccttgaggatcatcggccgcaacttacttttgttaccgtccttgaaatattcctgctggtaatcgagaatctcctgcatcgtccgcatcagcgtatcgtgccgctgcttgatcgccgaaatgaaccacttggccgaatcgatcttgctcttgacgaactgaatcgcctcgcggtccttctccttgacccgaccgtcggaatccaccatgccccgcatcatttcgatataacgatgattgattctcgcttcgggaagattgcccgaattgagcgtcaggtcgaaatgcccttcgtggtaatcgaggatgaaatccggcgtcacgtaaggcgtcgtatcggccccgccttcggagtaaaggttgcccggtttgggtgaaaggcgggtaatctcttcgatcgcctcgcggaattcgtcctcggaaacctgaagccgggccatcagtttttcgtaatgctttttgacaaactcgtcgaaatagcactccacgatcttgcgggccagccggcgggagcgggtattaagattctcctgatccaattgcaacaacaaacactcctgcaggttgcgggcacctacaccggtcggttcgagttcgtggataatcgacagcaatcgttccaagtgctcgaccgaaacatctacgccctgcgtgaaggcgatgtcgtcggcgatagcctccaaactccggcgcagatagccgtcctcctcgatactgccgaccagataaacggccagacgcatatcctgctccgagagattgcggtatcccaactgttcgaccaggtactcctgcaacgaacgtccgcccgcaaggggggcctggcgcggtttatcgtctttcgaatagttgttgatacggctcttataggaaggagtttcgtcttcccggaggtattcctccaccgaaatctgctgcggctgctcgtcctccggagtatgatcgtcttcctccaacacgatgttctcctcgatctcctgcttgatccgctgctcgagctgcatggtcggcaactccaacaatttgatcatctgaatctgctggggtgataatttctgttgcagggacaatacctgcttttgattgatcatgctcatacttgtctcctcccaattattaacttcgaaattagtaatcggcttcttcttttggcaaaataaaatattgcagttcgtgataaaagtattatcaggaacggctgaaaacgggttaatagataaatggtccggatttaattaaaattccgcattcttgggcgtacgggggaagggaatcacatcgcggatgttacccatacccgtcacgaagagcagcaggcgctcgaacccgagtccgaaaccggaatgaggagccgatccccaacgacgggtgtcgagataccaccagagttctttctcgttcatacccagttcgtgtacacgggccgaaagtttttcgtagtcggcctcgcgctccgaaccgccgataatctcgccgatcttcgggaacagcacgtccatcgcacggacggtctttccatcctcgttctgcttcatgtagaaagccttgatctgcttcggatagttgataaggatcaccggacgcttgaagtgctcctcgaccagatagcgttcgtgttccgactgcaagtcgcacccccagtcgcaggggaattcgaacttgcggcccgaagccttgagaatctccacgccctcggtataatccagccgcttgaattcgtggttcaacacgaagttgagccgctcgatcaaaccgttgtcccacatcttgttcatgaactccagatcctcgcggcagttctccaacgcgtagcggatcaggtatttcaggaaatcctcggccagctccatgttgtcctccagctcgtaaaaggccatttccggctcgatcatccagaactcggagaggtggcgcggcgtattggagttttcggcacggaacgtcgggccgaaagtatagatctgccccagcgacaaagctcccaactcgccttcgagctggccggacacggtcaggctgcacggacggccgaaaaagtcctgcgaatagtccacggccccctcttcggttttgggcaggttgttcagatcgagcgtcgtcacctggaacatcgccccggcgccttcgcagtccgaagcggtgatcagcggcgtatgcaggtaatagaaacctttgtcgttaaaatatttatgtatcgcataggccatcgcgtgacggatgcggaaaatcgcaccgaacgtgttggtacggggacgcagataagcgatgtcgcgcaggaattcgagcgaatgtcccttcttctgcaaaggataggtttcgggatccgccgtaccgtatatctcgatcttctcggcctgcacctcgacgccctgtcccgcaccgcacgaagcgaccaggcgtccgtccacacgcagacaggctccggtagtcaccttacggagcagctcctcgtcgaatttcgccagatcgaccacaacctgcatattcgccacacacgatccgtcgttcagggcgatgaaagccacgttcttatttccacgtttggttctgacccaacctttcacaacgacctcggcgtccgtcgccggcgactgcagcaattctgcgattctcaagcttttcatacgttcggtaatttcttcttgtttttactcattcttaaagatagacaaagataggatatatttgtgatttgtcaaaaaaaaagtacctttgtcaatcgcattatagtacaattccgccatgaaacgaattttcctcgctatcgccgtcctgtgttacaccggggccgtttacggacaagacgggggacgcatccaccgttccgaattcgtcccgttcgacacccgcgaagacgccgatgcgctcaaccggaaaaacaccgacaaatacctggttttcgcccccgggcttctgaacgacggggaagaggtgctcggaatcggggatgtggtcaatcttccgaacggttggttcgactcgttcatctacctccatctcgaaaacacgggcacggcctacacgctccgcgtcaatgaccgcaccgtagccgtggtcgaagaccctttcgctccggccgacttcgaccttaccccctacgtcaaacagggcgataacctcattttactggaactgcacgaaagtaatacgcccgaattgcaaaaaggtttcactccgaccccggtaaaaccgtttaccaacagttatcttttcgcccaggagaaacgcagcatacgcgatttcaacgtagcgctgatccccgattcgacccgcaaattcggcatgctcgacctggaggtgatcgtgcagaacggctacaactacgaggaaccgatcaccgtcgggttcgacatttacgcccccaacggcaagctgctcgatttcagcgtaaacgacataaccgttcccggacgctcgctcgacacggtacgcttctcgccctacatttatcacacctacgaaaatagctggggagccaaaggcgccgccccgctctaccgggtcatgctctacaccaaacgcaagggagtcttcaaggagtacatccccctcaaagtaggattcggaaagacggagatgaaagacgggaagattacccgtttcgacaaacctgtcacgatcgtttccgaaagatacaacgcggcagcggacgccgctgccacgcgcaaagaactgctggcgctcaagaaaaaagggatcaataccatctggcccaatgcgcctcaaccctattggttctacaatctgtgcgacgaactgggcctcttcgtgatcgatcaggccaatatcaacgctccggaaaagcgcgacgaccgcaccacaggcggcacaccgagcaacgatccgcgtcttgcggacgaatacctcgaacgcgtgcggaacatgtactaccgctcccgcaaccacacctgcatcatcggattcgctctgggtggagagtcgggcaacggatataatatgtacaaagcctatcagtggctcaagtccgtggaaccttcgcgtcccgtaatctgcatcgatgccgacggagagtgggatacggacctggaaatagtcccctgaaaaccgtaacgtaccccggccgcacattcggccggaaaccgtcatgcctgttggcgaatcgccggacgcagaaacaacctatcgccgttccgccgccaaaagccgccggcaggatgaccataaaccaaccaacgtgaacatcgaactgatcgtaatcggaaaaacggactccaaggagatcgaatcgctgctggccatgtatgcccggcgaatcaatttctattgccgtttcgccgtcacggtcctgcccgacgtaaaaaacaccaagaacctctcggccaaacagcagcgcacgaccgagggcgccagcctcctgcgtcagttcggcgacggggattacgtggtgctgctcgacgaacggggcgacgaataccgttcgatcgacttcgcctactggctgcaaaaacgcatggcgagcggcatccggcggctggtcatggtcatcggcggcccctacggattctccgacgaggtatatgcacgggccgacgccaaactgtcgctctcgaagatgaccttctcgcaccagatcgtgcgagccatcttcgccgaacagatataccgggctttcaccatcctgaacaacgaaccctaccaccacgaatgagctgtcccccgacaaaaccggccatcgccgtcattacgcccaacatcctgatcgggttgggcctgcggacgattctcgaaaaggtaggtcctccgggagagatcgccgtgttcgacagcttcaccgaattcatcgcttccggaccggagcgttatttccactatttcgccgccatgcaggttttcatgcgccaccgcaccttcttcctggaaaacagtcacaagacgatcctgctgggcaaagggtattcggcccagttcgcccgaatgcgccagatcgatatcttcggcggcgaagaacggctggtacacgatctgctgtgcctgcgcagcgaagcgcctcgacccgaccatgcccttccccggcagcacggcactccggccgccaacctgctctccgtacgcgaaacggaagtgctgacgctcatcgctcagggtttgctgaacaaacagatcgccgaccggctgcaaatcgggctcacgaccgtcatctcccaccgccgcaacatcatgcagaagctcggcgtacagtccgtcgccgcactcgtcatctgcgcggtcagcatgggctacgtggacgaaagcgacatccgcactcctcataaatgagggttgcaaaaacgatcggaatatcgttcctttgtcctcgaacaatcgcggtaaaagcgaacgcggcgctccggcgaaatcggagaaaaccgacggactctacggtctgcgccgtttttgccgttcgaaacgatccgatgatccgccaggcgatccatatcatctttctgtcggcgtgcatactcctgcacgccatgagcgtatgtgccgcccctgcgttgccggaagactccactccggtactggcggactccgttatccaggtggaagacatccaggtcacggccatcaaacagggcctcaacctgcgcaaccaacccgtaacggcttccgtaatcggacgcacggatctggaacggcggcacgtcgcagccctgaaagaggtttcgcaggtggttcctaacttccacaccccggactacggctcgcgcatgacctcttcgatctacatccggggactgggcgcccgcatcgaccaaccggtgatggggctcaacatcgacaacatcccctacctgaacaaggacgcctacgacttcgatttgacggacatcgagcggatcgaagtgctgcgcggcccccagagcacgctgttcggacgcaacacgatgggcggcgtaataaacgtctataccctgtcgcccttcaccttcgaaggagtgcggctgggcatggagtacggcagcggcaacacgcagaaataccggatttcgacctactacaaaaccagcgaacgggtcggcttctcggtcggagcctactattccaagaccgacggcttcttcaagaacctctataccggtgaaaaatgcgactgggagagaagcggcggcggccggttcaaggtacagtaccgcaacctgcacggacttcgtatcgacaacaccttctcgttcgtcaagctggaacagggcggctacccttacgcctatgtcgaaaccggccagatcgcttacaacgacccgagcgattaccgccgcacgaacttcaacgacggactgacgatccgctacgaaggagagaaattctccgtagcgagcatcaccagctatcagtacctcgacgaccggatgaacctcgaccaggatttcctgccgctctcctattttacactgacacaggcccgccgggagcacgccgtgaccgaagacctcgtgttccgctcccccgacgacaaagcctaccgctggctcctcggtgctttcggcttctaccgccataccagcatgcacgcaccggtgctcttcaaggaggacggcatccgcaacctgatcctcgatcgtttcgagccgcaggggattcacgccgaatggggcgaagatacgttcctgctcgacagccgcttccgcacgcccgactacggagcggccctctaccacgaatccacctacgacgccggccgatggcgcttcacggcaggcctgcgcgttgatttcgaggcttcgaagctccactaccgaagctatgccgaagccacctacacgacccaaacacccgacggcacgagctatccccacgctattctggtcgatcagccgggtacgctcaaacaatccttcacggagatacttcccaaaatatcggtgctctaccggatgggcagcgcacggcgtaacacgctctacgccaccgtcagcaaaggctacaaggccggcggattcaatacccagatgttctcggatgtcctgcagcagcaagtgatgaaacagatgggattcggctcgctctacgacgtggccgacgtggtgacctacaaacccgagaaaagctggaactacgaggtgggtgcccacctctcgaccccttcgcacaaggtgcaggccgatctggcgctcttctacatcgactgccgcgaccagcagctcacggtcttccccgaaggacaggtcacgggccgtctgatgactaacgccggccgcacgcgcagcttcggcggcgaagcgtcgctgctggctaccctctggcgaaacctcgacctgcaagtcgcctacggctacacccgcgccacgttcgtcaaattcgatacgggcaaagccgactacgctggcaacttcatcccctacgccccgcagcacacgctctacgccggagcgtcctatacgctccgcacgggctggaactggctcgaatacgtcatcttccgagtggctgccaacggtgcgggccgaatctactggaacgaagcgaacaccttctcgcaacccttctacgccctgctggaagcctcgattcgcttcgaacaccgccactgggccgtcgatgtctggggacgcaacctgaccgacacccgctacgatacattctatttcatgtcgatcggcaactcgttcctgcagcggggccggccacgcactttcggcgtttcattgagcatcaccctataaaattccatactatgaaaaaattcttcacgtttctcctccccttctccctgctcgcctcggctgctttgagcagttgctcggatggctgcaccggcgatcccgatcctaccccggaactccccgacgggtatacgtatgccacggaaaacacctcgatcaacgacggaaccgtcacggccaacatgcttttcttcggcacctcgaccgtcacgacggtcgcctcgggcgccacgttcaccgacgggaaagctctcttcgaactggttgccgacggcgaaggcaaggtgcgaatcctgatgcacgaaacccgcttcgccgccgaaatgcccgccctcgaaatggagataccgggcatctcctactcaggcgaggaaaaaaccatcgacttgagcgccgcctcggtcacaccggaaatcaagggcacgcccttcgccaaatacgtaatcaccaatctcacgggaaaagctgacagcaagtacttaacgattaccttcacctgtgcgggagctttcgatgtaaactatcagggacgcctgattatcgaaaaataaaatattttcgtatttttgtgggtgccggagcggagcggtaatctttgcgggccaaacgcacggttaccgttctctcttcagacattcgtccggccctgccgaacgaaacgattcgtttcacccataaaaaccgaaaaaatatgaaacccgaatacaaacctttcgtcgatgcgctcatcgaactggccatccgcgaagacatcggcgacggcgaccacacttcgctctgctgcatccccgcgacggaaaaaggccgcatgcgcttgctctgcaaacaggagggtattctcgcgggcatcgaaatcgcacaactggtgcttcgacgcctggaccccgacatgcaattcgaacagatcctccgcgacggcgaccgcgtgaagccgggcgacgtggccttctacgtttcgggacggctccagtccctgctgcaagccgaacgcatcctgctgaacatcatgcagcgcatgagcggcgtggcgacccagacagccgtctatgccgacaagatcaaagacctgcataccaaagttctcgacacgcgcaaaaccaccccgggcatgcgcgtattggacaagatggccgtcaagatcggcggcggtgagaatcaccgcatgggactgttcgacatgattctgctgaaggacaaccacatagactttgcaggcggcatccgcccggccatcgaaggagccaaaacctatctcaaggcaaaaggcaagaacattccgatcgaatgcgaagtgcgttcgctcgaagacatcgacgaagtgttcgccgcaggaggcgtggaccgcatcatgttcgacaatttcaccccggagctgacgcggcaggccgtcgcgaaggtcgccggacgctgcgaaacggagtcgagcggcggcatcacgctcgacacgctgcgcgaatacgccgaaacaggcgtggacttcatatcggtcggcgccctgacgcaccagatcaaatcgctcgacatgtcgttaaaagcctgctaaggtggaacgctggctacatagtaatccgggcatgctcctgcggcgcatcgtcctgctctacatcgtcctgctgctctgccgaatcgtcttttactgctacaactacgccctgatcggccccctgggttggcaggaggtcctgacattggcgggggggggtctgaagttcgacaccgtatcggttctctacgccaatctgcttttcatcgtcctctcgctgctgccgttccatttccgggagcggagctggtatcggcgtattctcttctggtactatgcggtgatcaattcgctgctgatcgtggccgtaaacctggccgattgcgtctatttccgctacacgcagaagcgtttcacctccgacgaaatcttcttcaccgacaactccaattcggcacagctcgtgctgaaattcgccgccgaaaactggtacctgctcctcgtcggcgcagtcctcatctggctgttcgtttggggttacggacgcaagatcacaccccgatcgcccctgcgcgagggctgggtttattactcggtcaatacgggactgctggtgatcgccattctgctcggcatcgccggcatgcggggcggcgtaacgcgcatgacccgcccgatcaccctctcgaacgccacgctctacgcctcgaccagcgaaaaggccaacctgatcctgagcaaccccttctgcattctgcggaccatcggcagcggcggatcggtcaaatacacccgctacttttcgcccgaaaaactggacgaatatttcaccccgacccaccgccccgactcttcggccgtgaacctcgaagggcgcaacgtgatggttttcattctggaaagcatgtcagccgaacattcggcctacctcaaacccgaattgtacggcaacggcacgcaaccgggctatacgccgttcctcgactcgctcatgcggcaaagcctctgtttcggacagatgtacgccaacggcacccgctcgatccaggccatgcccgccgtactgggcagcatcccctccttcaaacagcctttcgtgctgatgccccagtcgctgggcaaaagccgccaactgccgcagatactccgcgacaaaggctaccgaaccgccttcttctgcggttcggagcgcggttcgatgggtttcggagcctacgcccgcagcgccggcatcgatcggctcctgagccgcgaggattacgaagcggcacacggcacggaggatttcgacggttactggggtatctgggacgaaccgttcctgcaattcacgggcgaagagctctcgaaaatgcaggaacctttcttcgccacgctgtttaccctctcgtcgcaccatcccttcgtcgtgcccgagcaatacgccgacaagctgccggcgggaacgaccaaaatacacaaacccgtagcctacgaagatctcgccttccgcaacttctaccgccgtttcaaggacgaagagtggttccgcaggacaatcttcgtcttcgtcgcggaccacgtttcctcggagaaaatggcagaggaaacccgctcctatcccggcaactaccacatcgtcggattcatccacacccccgacggcgcactcgcaccgcaatttctggcacagaccgtgcagcagatcgacatcatgccgaccctgctgggactgttgggaaaccgggaaccctatttcgcattcggacgcgacattctgaacgaacccgaccgcgaaccgtgggccgtgatgtacgattcggaattccgggtcgtaacggacgaagcgctcttctcgttcgacgaggaatggatgaccggcgcgacgttccgaaacgagacttcggaccgggaacagaccgcgtcggtcgaaaatcggctcaaggccctgattcaacagtattacgggcatgtggaagccaaaaattacaccgtagaagacaatttatgattaccttcaaacccattacgatcgaagacaaggccgaaatcgaatccttcacattgccttacgccccggcgaactgcgacctggcgttcgccaacatgttttgctggcaattccagttcaaaaccgcctggagcgtagtggacggctttctggtcatccgcttccagatcgggggcagcgaccggatcggctacatgcagcctgtcggcgcaggagatttcacccccgtcctgcggcatctggaggaggatatactcgctgccggacaacggcttcggatcatcgacatgacacctgaagggctcgaaaaactccgcagtgtaggccactgccagttcgctttcgcctccgaccgcaatctggaagactatgtatacaacgcttcggacctgcgcgaccttcctggccggaaataccaatccaaacgcaaccacatcaaccgcttcgaggcggaatacgaataccgctacgagcctatgacccgcgaccatgctgcggagtgcatgcgtctggaagccgaatggcgcaagacccgcagcggacatacgggcgagctgtcggccgaacagcgggccatgcagcgggctttcgcccatttcgaccggctgggacttatcggtggctgcatctacgtcggtgataaactcgtcgctttcacttacggctcaccgatcaacgaccatacgttctgtgttcatgtcgaaaaggccgacaccgaatacgacggggctttcaccatcatcaaccgggagttcgtggcgcacctgcccgagcaatacacgctcatcgaccgcgaagaggacctgggtattccgggactacggcaggccaagctctcctaccatccggcattcctcgagaagaaatatacggccctctgcctctaccccgacgaaatagcctgcaaacggctctggataaagtgcttcggagacgaagaaaccttcatcgactccttcctgatcggccattacagccgcaagcggatgctcgcagccgaagaggacggccgtctggcggccatgctgcacctgatcccgttcgaaagcgagctggggcgcacgacctacatctacggcgtggcgaccgaccccgactaccggggccggggcctggcctccggattgatgcgcgaggcgatgcggcggatcgcagaagaaggggccgacgccgcgatccttatcccaagccaggaaagcctcaaggacttttacgccccgttcggcttcgaagaccggtcgcttccggtcgttttcgaagcgccggacgacttcgacttcggctcgggcaatcaggaacaggatcgggctatggtctggcgccgcaacaacagcgcaccgctgcccgaacgtttgcactgccggcttctctgatcccgcaaagaaccgttccgcagaaagtacggccggacgcctcgaggcgtccggccgtactttctcaggtccttccgaacacccgcttccgcgcgatcggatccgaagattccactctttcggagaagaagtgaccgattatcgacaaaaaaacgtcgaaatcattgcaaatcattcgtcaaatgtttaattttgttagattaaagactgatattgttaattttaagtaaaatcaatcaccatatgaagaagcttatatctgctgccgaagcggcgggaatggtaaaagacggaatgacggtcatgatcggcggctttctgggcaacggaagcccccacgcgatcatcgacgcactggttgaatcgggcgtaaaggacctcaccctcatcgtgaacgatacggcttatccggacaaaggctgcggacggctgatcgccgggaagcaggtccgcaaagtgatcgtatcgcacatcggcaccaacccctgcaccagcgagcagatgaacagcggcgaactggagatcgaattctgcccgcagggaacgctggccgaacgggttcgttcgggcggggcaggtctgggcggtgtgctcactccggtcggactcggaacgatcgtagccgaaggcaaacaaatcatcaacgtcgatggcaaggattacctgctcgaaaaaccgctgcgggccgacgtagccctgctcggcgcgagcctggccgaccgatcgggcaacctggtctataaaggcacgtcacagaatttcaacccgttgatggccaccgcagccgacctggtgatcgccgaggtgcgggagctggtagaaaccggagcgatagcccccgaagcggtccgcacgccgggtatcttcgtagattacatggtcgctccggccaaataaccgaacggccgaaagaacaaatccgcatctcaatcgaattaaaaatatcaggttatggaaaaatcaatgatacggcttcggatgagtgccaaagacgctcattacggaggcaatctggtggacggcgcccatatggtgcatctgttcggcgacgtggccaccgaactgttgatcatgcacgacggcgacgaaggactgttcgtggcctacgacaacgtcgaatttctcgccccggtctatgccggcgattatatcgaagcggtgggcgaaatcgtgaaggtgggcaacacctcgcgcaagatggtcttcgaagcccgcaaagtggtcgctgcacgccccgacatctcgccctctgcggccgacgtactcaaagagcccgtcgtggtctgccgtgccagcggcacgtgcgtcgtaaaaaaagaggaccagcgcatccctgagagccgctaacggaattttcggcccgttccggacacgaaagcgtcccgcgatgcgaagaccgcaggcaggagcgccggagagagaaaacggccgatgcgaccggaaattctcggcgaacaggtccgaacaggtttagccgccacatcggacaaagcaacggaattcaaccattttcaaacttttcaaccaaagaccccatggaaaaactgatcataacggccgcgatctgcggagcggaagtactcaaggaacacaaccccgcagtcccctacacggtggaagagtgcgcccgggaggccaagtcggcctacgatgccggcgcgagcatcatccacctgcacgtgcgcaacgacgacggccaacccacgcaggataaaaaccgcttcaaacaggttatggacgctatccgtgcggtttgcccggacgtaatcatccagccttcgacgggaggtgccgtcggcatgaccaacgacgaacggctgcaacctacggagctgctccccgaaatggcgaccctcgactgcggcacgctcaatttcggcggcgatgaaatcttcgagaacacggagaacacgatcaagtacttcggtcagaagatgatcgagcggggcatcaaacccgagctggaggtcttcgacaagagtatgatcgaaatggcgctccgcctgcacaagaagggctatatcgccgaccccatgcatttcgacttcgtgatgggtgtgaacggcggcatcggaggcgacatccgggatttcgtcttcctgcggggcagcattccggccgatgcgacctacacggtagccggcgtgggacgctacgaatttccgctggcggccctggcgatcatcgacggcggccacgtgcgcgtaggtttcgaggacaacgtctatctctccaaaggcgttccggccaaatccaacggcgaactggtcgagaaggtcgttcgcatggccaaagagttcggacgcgaggtcgctacaccggacgaagctcgccgcattctgggactcaagaaataagatcacccaaaaaacatcaacactgcaacacaacaaaacaccataatgaaaaaaggacataaatacggcacacaccgggtaatctccccgaagggcgtgcttccccagccggcagacaagctggacaacaacatggacgagatctacgacaacgagattctgatcgacgtacagaccctcaacatcgactcggccagcttcacccagatctcgaaccaggccggaggcgacaaagccaaaatcgccgagatcatgctcgacatcgtcgaaaaacaaggcaaacaccgcaatccggtaaccggatcgggcggcatgctgctgggcacggtcgagaagatcggcgacgcgctcgtcggcaagaccgacctcaaggtaggcgacaagatcgccacgctggtttcgctgtcgctgactccgctgcggatcgacaagatcaaggagattcgccccgatgtcgatcaggtcgatatcgacggcaaggcgatcctgttcgaaagcggcatctacgccaaaataccttccgacctgcccgaaaagctggtaatgtcggccctcgacgtggccggagctccggcacaggtagccaaactggttcgccccggcaacacggtgctgattatcggcgcagccggcaaatccggcatgctctgctgctacgaggctcgcaagcgggtcggcgtaacgggcaaagtgatcggactctgttacagtcccgaggagaaggagcgcctggacaagctgggcttctgccacgaggtagtctgcatggacgctcgtcagccgattccggtactcgaaaagattacggagctgaccaatggcgaaatgtgcgacatcaccatcaacaacgtgaatgttcccgacaccgaaatgaccagcatcctctgtaccaagaacacgggcatcgtctatttcttctcgatggccacgagcttcacgaaagccgctctcggcgccgaaggcgtcggcagtgacgtgacgatgattatcggaaacggctatacgaagggacatgcggagatcacgcttcaggagttccgcgaatgcgaagccttgagaaagatattcaccgagctgtacgcctaaccgatacgaacgacacctgccgcccttcctcatcgtccccgccggcgcaaattaaaaaagcaggacggatccgacttatcgaggcagggaggcactcatcgaaaatagccgtccgccgcatccgttttcgatgagcggacggcgaaaacaaacgctcgctacatcggcgaaaaaacacaaatcgcaacaacgtaacaaccgaacgaaacaaataaaatcaaatgacacctctcacacccgcaatgagccgcagaaaagaattctttcccgaagtgaccgaccagcaatggaacgactggcactggcaggtaaaaaacaggattgagaccgtagatgagctcaagaaatacatcaagctgaccgctgaagaggaggaaggcatccgcgaatcgctcaaaacgctccgcatggccatcacgccctactacctgacgctgatcgatccggaaaatccgcactgcccgatccgcaagcaggccattcctaccgtcgaggagctgaagcgctcgcccgccgacctggaagatcccctgcatgaggacagcgactcgcccgtaccgggtctgacgcaccgttaccccgaccgggtactgttcctgattaccgacatgtgctcgatgtactgccgtcactgcacgcgccgccgcttcgccggccagcacgactgtgcaacccccgagaaacagatcgacgactgcatcgactacatcgcccgtacaccgcaggtacgcgacgtgctgctctcgggcggcgacgccctgctggtgagcgacgaaaaactcgaatatatcatcagccgtctgcgtgccattccccacgtggagatcatccgcatcggctcgcgcaccccggtcgtgctgcctcaacgcatcacaccggaattggtgaacatgctcaagaaataccacccgatctggctgaacacccacttcaatcatccgaacgaagtgacccccgaatcgaagcaggcctgcgcacgtctggccgacgccggtattcccctgggcaaccagtcggtgttgctgcgcggtgtgaacgactgcacgcacatcatgaaaaagctcgtgcacgaactggtgaagatgcgtgtgcgtccctactatatttatatctgcgacctgtcgctgggcatcggacacttccgcactccggtatcgaaaggcatcgaaatcatcgagaacctccggggacacacctcgggttacgccgttccgacattcgtcgtggacgctccgggcggtggtggcaagattcctgtcatgccgaactatgtcatctcgcaggctccgaaccgcgtggtactccgcaactacgaaggtgtgatcacgacctatacggaaccgaccgactacaaggacgaatgccactgcgaagagtgcgagaaagcacgtcggaaggaaggcgtggccgagttgttgagcggcggacgtctttcgctcgagccgtccgaattgagccgcaagacccgtaaccacaaccattagaacgtaacgctgcaagaccagcccgcaccggattgggattcgtaacgaacatatcggatttcggcagcctggccatcgtcggcctggagaagaacacgggtaaaaccgaatgtctgaactacattctgggacaactcggtggtcgggcggaccgtttcgccctgacttcggtcggaatcgacggcgagagccgggatcaggtgtgccagacagcgaagcccgagatcgagattcccgagggaatgatcttcgtcacctcggagaaacactaccgggaaaaacggctcgcggccgaggtcctcgacgtgagcctggaacggacggcgctcgggcggctgataacggcccgcgcgaagatgagcggcaaattgctgctctccggaccttcggacacggcgggcctgaaagccctgatcgacctgctcaaatcccggggcgtaggcacgacgatcgtggacggcgccctgtcgcggttgagcctggcttcgccagcggtcaccgaagcgatgatcctggccacgggagctgccgtcgcgggaaatattcccgaactggtccgcaagacgaaatacgtttacgaactgatcgggatcgaagagatcgaaaaggcgctgcgtacccggctcgcccccctgacgcagggggtgtgggccgtcagcgacggcggcgaaccgatcgacctcgaattaccctcggtgctgatgctcgaacggagcggagaaaacctgttccggcacggccggcggatttacgccaccggcatcgtcacggacaagctgttccaactgctgcgaacgcaacaacgggaagtggagttgatcatccgcgactttacgcgggtgttcgcctcgcccgaagcgttttacgctttcctgcgccgggggcaccggatcagggtggtacaccgcagccggctgctggccgtcacggtcaatccgacggctccgtcggggctggtgctcgactcccgacagttgtgcgaagcgatgcaggaggcgttgcagataccggtttacgacgtaaagaaaatgcccgaatagaaacgaatacggctcacacgaacagaatcgaggatcttaaagtcccctccgaggaggggagtcagaggaaggtcaaacgctctgacacggcagaaggccgtgaaataaatacgcgaacccgtgtaaaattgcatcgaataaccagaaagcgaatgcgactcaaagaggccatacaacataccagcggactgcgctgcgtcgtcgaaggaatggagatctgttcctccgtcgggcgacgtatgctccatgaaatgacatggctcggcgaggagtcggcgatcacggcggaacacgaccgtatcacctcggtgctgcgcctgctcgaaaccgaagagggacgcgaccgcaccgaaacgattcgccgcaaactggccctgttgcgcgacatccgctcaacgatcgaacgcacgggcggcaactgcgtattcgacgacatcgagctgttcgaattgaagtttttcgcgctgctggcggaagagcttcgaccgctggcatcgcaagggcgtcttgccgaacttcccgagctgaacggggtcgtcgatctgctcgatccggaaggcaaccggctcccccatttcttcgtctatgacgcctactcggaggagctgacgaccctgcgcaaacagatcaaggcccgcaaacaggccggagccgacgagtctcaagtgcaggagctctatttccgcagcgtggagatcgaagactgcattcgggagaggctctccgtcgaattgcggaaataccacaaagcgttgcaacaggcactcgacctgatgggatggctcgatgtggtgatcgccaaggcgatgcaggcccgcgactggggccttacccgtcccgcgataacgcaggacacggcctccttccgaggcttgttcaaccctgagctgcggatttcgctcgaagcggccgggaagcgattccagcccgtgaacatccgcctgacgacgggacctacggtaatcaccggcgccaacatgtcgggcaaaaccgtgttgctgcacagcgtcgagctggcccagtacatgctgcaattcggattttacattgcggccgaaagggcggaaatggcccttgtggacgaagtacactgctccatcggcgacggacaggaccagctcagcggactctcgtcgttcgcggccgagatgatgcggatggacgaactggccaaaagcgtccgggcaggcaggcgggtgctggctctcatcgacgaaccggcccgcacgaccaatccggtcgaaggaagggcgatcgtgaacggcgtcctcgaatttctggccgactacgaagtcccttcgctcgtaaccacccactacaacggcatcgcggctccgtaccgcaagcagaaggtaaaaggcttctcggaaacgaacgcggaggagaggatcacgctgaaaaacatcaacgatttcatagactactcgctcgaggaggtcacgacggacgaagttccgcacgaagcgatccggatcgcccgtattctgggcatcgacccggaaatcctccggcgaatcgaacgcaacgaagaactcaaaaacaaccaatgacggcagccgtacggcacagcctacatgaacgatatgaaaagcaaattaggaatagactttaaccaggtggaacacgcccgggacgtagcgcgcaagatcgccaacggggtgcaggattttgtggaaggttatacgacggtagccgtcgagcggacgctgtgccgtctgatcggcatcgacggcgtggatgccaacgcggtaccgctgccgaacgtggtggtggaagagctgcgggagaaaaacgtactgggcgaaggcgccctgttcttcctcggcaacgcgatcgtcgaaacgggactcacaccccagcaaatcgccgaagagatcgctgccggcaaactcgacatcacccgctcggccgtatgtacggcagccgagcgcgaagcggcgctgaaaccgtatatcgacgccagcatcgccaaaatcgcagccaaccgccagcgtcgagaaaactacatcgccaccatcggcgaagggccgcgcccctacctctacgtaatcgtagcgacgggtaacatctacgaagatgtcgtacaggcgcaggccgcagcccgacagggcgccgacatcatcgccgtaatccgcaccacgggccagagcctgctcgactacgtgccctacggcgcgacgaccgagggattcggcggtacgttcgccacccaggagaacttccgcatcatgcgcaaggctctggacgaagtaggcgaagaggtcggccgctacatccgcttgtgcaactactgctcgggcctctgcatgcccgagatcgccgtaatgggcgcactcgaaggtctggatgtgatgctcaacgacgctctgtacggcattctgttccgcgacatcaacatgcagcgcacgctggtcgatcaatatatgtcgcgcgtaatcaacggcttcgccggcgtaatcatcaacacgggcgaggacaactacctcaccacagccgacgcggtcgaggaggctcacacggtgctggcttccgacctgatcaacgaacaactggccctgctggccggcctgcccgaggagcaaatgggtctgggacacgccttcgagatggatccgatgctcgaaaacggcttcctctacgagctggcgcaggcgcagatgacccgcgagatcttccccaaggctccgctgaaatatatgccgccgacgaagttcatgaccggcaacatcttccggggacatatccaggacgcactgttcaacatggtgggcatctggacttcgcagggcattcagttgttaggtatgccgaccgaagccatccacaccccgttcatgtcggaccgctacctttccatcgagaacgcccgctacatcttcaacaacatgaagaacatcggcgacgaagtggagttcaaggaaggcggactgatccgcaaacgtgccaaggaggtgttggacaaagctaccgcacttctcgaacgcctcgaaaaagagggactcttctcggcgctcgagaagggaatcttcgccgacatcaaacgccccatgaacggcggcaagggtctggagggcgtgagcagcaagggccgcaactactacaaccccttcgtggagattatgaaaaacggcagtcgcgccgcagcgaaaaaatgatattccgatgctgcaagtacgaccaaacgccttattttaactatattagcatattgattctatgagtggaggattatattcaaccgaaggcagggatttcgaccagaccctcgacctgaaaaagataaagccctacggcgacacaatgaacgacggcaaaacgcagttgagtttcacactgcccgtgcccgccggcgacgaagccatcgaagcggccaaacagttgatgaaaaagatgggcttcgagaacccgcaggtggtattccaccgggagctgacggccggttacacgttcttcaactgctacggaagctgcacccatacggtcgattattcgaatatccatgtcccgaaagtcgaatcgaccaaatgggacatggccgaaacggacagcttcatccgcgagcagatcggccgcccgatcgtggtgatcggcgccagcaccggcacggacgcccatacggtaggtatcgacgccattatgaacatgaaaggcttcgcaggccactacggactggagcgctacgagatgttcgaagccctcaacatgggcagccaggtgaccaacgaagagttcatcgccaaagcgatcgaactcaaggccgacgccctgctggtttcgcagacggtgacccagaaggatatccatatcaagaacctcacggagctggtcgaaatgctcgaagccgaagggctgcgcgacaaagtgattctggcgtgcggcggcccgcgcatctcgcacgaactggccaaagagctgggctatgacgccggcttcggcatgaacacctacgccgacgacgtggcgtcgttcatcgcccaggagatggcccgcagaatgcaccgcaaataggaaacggtcccggattccagaaccgccccgtttcaagacagtacgacgaacagacaaaaacgacataaatctatggaaaaggaacagatcagagaaatcatcgccaaacgcgtggcgatggaactcaaagacggcgacgtggtgaacctcggtatcggactgccgacggccgtccccgattacctgccggaaggcgttcaaatcttcctgcagagcgaaaacggcctgctcggtatgggcccgacccccgcaccgggcgaggaagaccccgaatttatcaatgccggcggcggattcgtcacggccctcgagggcgcctcgtgcttcgacagcgccacctcgttcggcatcatccgcggcggtcatgtgaacgcttcggtactgggagccttgcaggtcgatgaaaaaggcgacctggccaactggatcatcccgggcaagaaagctcccggcatgggcggtgcgatggacctgctcacgggtgccgacaaggtgatccttgccatggagcacacggccaaaggcgcacccaaaatcctcaagaaatgtacgctgccgctgacggccaaaggctccgtgaacatgatcgtaaccgaaatgggcgtcatggagattaccccggaaggcatcgtgctgacggaaatcaatcccgaattcaccgtcgaacaggttcaggccgctaccgaagcgcacctgatcgtgtccaaggatcttaaacccatgaaaaaataggcccgccatgatcaaaacaggagataaataccgtcacgaagtgacctatacgcaggaaggcgtgatcgctttcgccgaaatcacgggcgacaaaaacccgatccacctcgatccggaattcgcagccaaaaccccgttcggccgtcccatcgtgcacggattcctttcggcctccgtattctcgaaggtcttcggaatgctcttcccgggacagggcaccatctatctctcgcaggagatgtcgttccgtgcacccgtcttcgccggggagaaatatacggccgaattcgaagtaatcgacgtaaacaccgaaaaacacatcggtacgatcaaatgcctgctgctcgatgctgccggcaaagagtgcatcacgggcaccgccaaactcaaacacaacaaagaattcatctaaaaagagataaccatgaaaagacttgagaacagagtcgccatcgtcacgggcggcacggccggtatcggcgaagcaacggcactgcgtttcgcacgcgaaggcgcacaggtagtcgtatgggcacgtaacgaagcccgcggtaaggaaatggagaaaaaagccgcagccgaagggctcgccatcaccttcgacaaggtcgatacgagcgatttcgaggcggtaaccgctgcggccaagcgcgtcgccgacaagttcggcaagatcgacatcctgatcaacaatgccggcatcaccaacgacagcacgctcaagaaaatgaccgtcgaacagtggcagaacgtgatcgacgtcaatctttcgggcacgttctactgctgcaaggccgtgttgaactacatgctcgaagccggctacggacgcatcgtcaatgcctcgtcggtagtagggctttacggcaacttcggccagaccaactacgtggccacgaaagccggcctgatcggtatgaccaaaacgatggcccgcgaactgggacgtaagggtatcacggtcaatgccgtagccccgggcttcatcgaaaccgaaatggttgccaagatgcccgagaacgtactcgacggcatgcgggccaaagttcccgtaggtcgcctgggtcgtcccgaggagatcgccgccgcctatctctacctcgcatccgacgaagcggcctacgtcaatggtgccgttttgagcgtagatggcggtatgactgtttaaaatcattaaaaaaccatacttataaaatgaatttcgaattgaccaaaaccgagcagctgttccggcaaatgatccgcgaatttgccgaaaacgaggtgaaacctctggctgccgaaatcgacgaagaggagcgtttccctgtggaaaccgtagagaaaatggcaaaactgggaatcttcggtattcccttccccgtcaactacggcggtgcaggcggcaacaacatcctttattcgatggccgtcgaagagctgtcgcgcgtatgcgccactacgggcgtggtcgtatcggcacacacgtcgctctgcgccgctccaatttatgagcacggtaccgaagaacagaaaatgaaatacctgcccaagctctgctcgggcgaatggctcggcgctttcggcctcacggagcccaacgccggtacggatgctgcggcacagcagaccacggcagtcgatgcaggcgaccactatatcctgaacggcaacaaaatcttcatcaccaacgccgcttacgcacacgtttatatcgtgatggcgatgaccgacaagtcgcagggtacgcgcggtatctcggcattcatcgtcgagcgcgacttccccgggttctcgatcggcaagaaagagaagaagatgggtatccgcggttcagcgacctgcgagttgattttcgagaactgcatcgttcccaaggagaatctgctcggcaaggtcggcaagggcttcagcatcgctatgaagaccctcgacggcggccgtgtcggtatcgcttcgcaagccctcggcatcgcgcagggggcgatggatgaaaccgtgaaatacgtcaaggagcgcaaacagttcggacggacgatcggacagttccagaacacccagttccaactggcagacctggataccaaaatcgaagctgcccgcctgctggtacgtgccgcagccttcaagaaagaccagaagctcccgttctcggtcgatgccgcccgggccaagctctttgcagcggaaaccgcaatggaagtgacgaccaaggccgtgcaattccacggcggatacggctacacgcgcgaataccccgttgagcgcatgatgcgcgatgccaagatcaccgaaatttacgaaggtacttccgaagtacagcggatggtgatttcgtcggcactgttgaaatagcggcgggcgaccgtgcatccggttccggaataaaccccgaagccggtcgtactcccctcgcaaggacacataaggtaaaaacaataaaaaacagatattcgaatgaaaattgtagtttgtataaaacaggttcccgatacgacggaaatccgcctcgatcccgttacgggaacgctgatccgcgacggtgtgcccagcatcatgaaccccgacgacaaggcgggactcgaaatggctctggagctgaaagaccagtacggcgcacacgtcaccgttatcacgatgggtcctccgcaggccgacgacatcctgcgcgaagccttcgcaatgggtgccgaccgtgcgattcatctgagcgaccgcaaattcgccggtgccgatacgctggcgacttcgaacgctatcgccggtgctctccgcatgctggagttcgacctggtaattaccggtcgtcaggctatcgacggcgacacggcccaggtaggcccgcagatcgccgaacacctcggtctgccgcaggtgacctacctcgaaggcattaaatacgaaggaggaaaccggctcgtcgtcaagaaatggacggaagaggggtatcagttgctcgaggtggaaaccccgtgcgtggtaaccgtactctcttcggccaaccggccccgttatatgtcggtacgcggcatcgtggaggcatacgacaagcaggtggaagtctggggtttcgacaacatctccgtcgaagagtcgaaactcggcctcaacggttcgccgacccgcgtcttcaaatccttcacgaagggtgcgaaatccgcaggtaaggtcttcgagctggagccggccgaagcagccgatctgatcgtcgagaagttgcaagaaaaattcataatctgatcggccccggcaactgcgaagctgtaaattaccgatcgttcatttacaacagtcgttttctgcacccggcaaaagccgaatcctttcggtccagcccgctgaaaacgttcataaaaaacacagttacttaccaagatggataaatctcaatataaaaacgtttacgtgttcgtcgaacagcgtgacggagtcgttcagaacgtcgctctcgaacttctgggaaaagcccgcgaactggccgacgcactccatgagcaggtaatcgccctgctgctcggcaaaggagtcaaagacaaggccgacgagctgatcgcagccggagccgacgtggtcctttcgatcgaagccgacgaactcgcccagtacaccaccgagccttacgcacaggccatcacccaggtaatccacgagcgcaagcccagcattctgctgatcggtgccaccagcatcggccgcgacctcggtccgcgtctttcggcacgcatcggcacgggacttaccgccgactgtaccggtctcgacatttcggaagacggcgacctgctgatgacgcgtcctgccttcggcggcaacctgatggcaacgatcatctgcaaggaacatcgtccccagatgtccacggtacgccccggtgtgatgcgtgccaaagcggccgatccgacccgcaaaggaaaggtcgaggacgtaaaaatcaatttcgacaaatcgaagttccgcgtacggattctggaaacggtcaaggaacagaagaatatgatcgacattacggaagccaaagtactcgtttcgggcggccgcggtgtcggcacggcagaagggttccagaccctgcgcgagcttgccgacgtgctcggtgccgaagtatcggcttcgcgtgcgatggtcgatgcaggtattctcgcacacgagcgacaggtcggacagaccggtaaaacggttcgtccggacctctacttcgccatgggtatctcgggtgcgatccagcacctggccggtatggaggagtcggacttcatcatcgccgtgaacaaggataaattcgctccgatcttcaacgtcgccgacgtgggtatcgtatgcgacgtgcacaaggtcgttccgatcctgacagagaaactgaagacgatgaaaaagtaagtccggggacttgctcttcaaaataagggaagattcgcaatgaatcctcccttattttttatggccggtgcgaatcctctgaaacccgaccgcccggacctctcccctcccacgtattcacaaaaaacaggcagttcggcccttgtaaaacaaataaaaaagcagacgcaaggtttttccttgcgtctgcccctgatatcgagatataatccgcatcaaggcaatccgtcctcattcggcacgattgcacagatacccggaatctatttcgcaacttttttgaggaatgcctcgatcgtattctcgatcagacaggcgatcgtcatcggacctaccccgccgggcactttcgtgatcagcgaagccttcggctcgcaagcctcgaaatcgacgtcgccgcacaatttccccgtttcgggatcacgattgacacccacgtcgatcaccaccgcaccgtcgcccaccatgtccgccgtaacgaacttcggacggccgatcgccacgaccagaatctccgcttcgcgtgtcacatccgccaggttcttcgtccggctgtgagtaatggtcaccgtagcattctcatcgagcaacagcttggcaacgggaagccccacgatcgtactgcggccgatcacaacggctttgcgtccggccagctccacgcccgaatccttcagaagcttcatgatacccttcggcgtacagggcagcacgcagggctgtttctgccagagagccgccacattgagggggtggaagccatccacatccttctcctgacgaatccgtgcgatcaccttatccgaatcgatatgtttcggcagcggcagctggatcaaaattccgtccaccgtatcgtcggcattgaggtcgtcgataattttcaacaactcctcctccgagatgtccgccggcttgcgaatcgtcgtattcaggataccgacctcgtcggcagccttcgtcttacccgtcacataggatacgctgcccgcatcctcaccgaccagcaccactaccaaatggggcagccggccgtatttctccgggaatgtcttcacctgctcggccatcttggccttgcaagccgccgctaattcttttccgctgattaccatatattgttttgattttaaagattgctttatccgtcccatccagggattcgaaggacaaatataactattttttcactaaaaacgaaagagccttcataccgatatcggatcgatagaaaagattctcgcaaccgattttccggacctcctcgagcgcccggcacctggcctgctccgggtcggcaccccgacagacgacgatcatcacccggccgcccgaggtaacgagccgcccctcttttatcgccgtgcccatgtggtacactacgccgtccacctgctccgttcccgtaatttcataccccttctcataggagccgggatatcctttcgatgccagcacgatccccagagtcgcaaagtcgtgccactcggcctcgcccggatcccgtccgtcggctacggcgctgaaaatatcgtaaatgtcgctcttcaggcggggcagcaccacttcggtttcgggatcgccgaaacgggcgttgaactcgatcacgcggattccctgcggggtcttcatcaaaccgccgtaaagcacgcccgtgaaaggacatccctcgtcgcagagagcgtcggccgtgcgctgcatcaccttttccaatgcgaaagcctcgtcttccggagtaatgaacggcagcggggagtatgctcccataccgcccgtattgggaccttcatcgccgtcgaacgcccgtttgtgatcctgcgccagcaccatcggcagcaccttgcgccccgacacgaaacacatgaacgaaaattcgggtccggtcagaaaatcctccacgaccacacgtcccttgccgaacttgtcgtccagcaacatgtcgcgcaacgcggcatcggcctcctccatcgtccgggcgataacgacaccctttcccgcagccagaccatcgtatttcaggacggcgggcagagggcgcgaacgaacgtactccgaagccttccggtaatcgtcgaacgcccggtaaccggccgtcggaataccgtaccgccccatcagatcttttgcaaactccttgctcgactcgatgcgggccgccgccttcgtcgggccgaaaatacgaagtccctcctcacggaagcgatcgacgataccggccacgagcgccgcttcgggtcctaccaccgtgaggtcgatctctttttcacgagcaagggaaagcaatccctcgacatcggtatccttgaccggcacacactcggcctgacgagcgatacccgcattgccgggagcgcaatatatcttcgaaacctgcggcgaacgcgacaacgcatcgacgacggcatgttcgcggccaccgccgcctacgactaaaactttcataacctatcgtttattcccgaccgcactttccgcaaagagcggctcggaaatcgtccataaaaaataatccgaccgacggacacgaaatccgcagtttaatgtttgaaatgacgcatcccggtaaacaacatcggaatacccgattcattggccttccggatcgaatcctcgtcccggacgctgcctcccggctgcacgatcgcctcgacgccgctcgcagccgccaggctcacgcagtcgtcgaaggggaaaaagccgtccgaagccagtaccagcccttcggtcacaccctgggcatgggcctgcttgagcgcgagttccgccgagccgatgcgattcatctgccccgctccgacacccagcgtacgaccgtccttcaccactacgatagcgttcgacttcacatgcttgacaatacgccagccgaaatcgagatcggcgagctgcctttccgtcggccgcttctccgtcacgcacatatccgccgtcacgggacgtgtttcgaggtcgaggtcctgcaccagcaatcctcccgtcacactcaccaactggcgctgcttcgcatcgctcttctccatcggaacttcgagcagacgcagattcttcttcgtcgagagcacttcgagggcttcgggcgtaaacgaaggggccatgatgatctccagaaaaatcggcttcatcaattcggccgcctcacgggtcacaggtcggttcagggcgacgataccgccgaaaatcgacactttgtcggcctcgtaagccttcgtccaggcatccgccgcatcccgccccaccgcagcaccgcagggattcatatgtttgagtcccacgcagaacggctcatcgaactcccgcacgatcgcaagggctgcgttggcatcctgtatgttattgtaggacatctccttgccattgagctgccgggcataggccagcgaatagggcacccgttcgccgctgcggtagaacttggcctgctggtgcggattctcgccgtagcggagcggctgaaccagatcgaactccaggaacaacttctcgtcgagccccgctttttcacgcatgtacgtagcgatcatcgcatcgtactcggcggtatgggtatatgccttggccgagagctgcaaccgcaatcggggagtcgtattgccgtatcccctaatctccgcaaggatcgtgtcataatccgccgggtcgcacactacggtcacgtccttgtagttcttggccgcactgcgcaacatcgaaggtccgccgatgtcgatattctcgatcgcctcgtccatcgtcaccccttcgcgggcgatcgtctgacggaagggatagagattcacgcacaccatgtcgatgaactcgatgccgttctcccgcaacgctttcaggtggttcggatcgtcgcggcgagccagcaggccgccgtgcaccttgggatggagcgtcttgacacgtccgtcgcagatctccgggaaccccgtcacatcgctgatgttgatcacctccacgccgctttcagccaacagtttcatcgtaccgccggtggcgatcacctgccagccgagctctcgaagtccgcgcgcgaactccaccacgccggtcttatcgctcacactgattaatgctctcatattgctaatttatataggcaatcatatctttcaatataccatttccgacgatcgcaacatcgaatccgagagtcgcttattcgcggtccaatgaccgcatttaccactccgccttcccctaatcctttctcgaaagggaaagggtcgctgcatttccaaagaggtacactaaaggatatgatcgcgttaatatatacgtagttttatcgttttcgactcgcggtcgccgttattcacggtgtccgacgatgtgtttccaggtccgaatccgcactaaaccgcgacgttcccgcgatcctattgctccgcaaccagctttgccaccgtttccacatacagcggatgttcgacggcatgcacccgggcttccagctcttctggatcgctccccagatactcgaaagcccgctgggcgatgatccggcccccgtcgagctctccgttcacatagtggatcgtcacaccgaagaccttgacgccgtaagcaaaggcatcggcaatggcatgcgcccccttgaacgcaggcaacagcgagggatgaatattgacaatccggtcgcggtacgcctccagcaccacatcggaaaggatgcgcatataccccgccagacagatcagctcgaccctttcggcccgaagcctgcggacgatctcccgttcgtagtcggctttcgaagggtactctttggggttgaacgtaaaggtcggaataccgtaacgggcagcccgctcgttcacgaaagcccccggcttgtcgcagaccatgagggcaatgcgagccgcaatgcgcccgtcggcacaagccgcagccaatgcttcgaagttggagccgtttccgctggcgaatactgcgatcgtcttcatcgccctatcggatttccacgcccggacgatccgtcacccggccgatcaccgaagctttctcgccctgtttctccaaaatggcgatcacttcggaagcttcatcctgcgaaaccgcgatcaccataccgatacccatgttgaagatattgaacatctcgcggtgagcgatcttgccgtatttctccaacaggcggaacacgggcaggatctcccacgtcccctcgtgaatctcgataccctggccctcgctcaggatgcggggaatgttctcgtcgaaaccgccgcccgtgatatgactgatgccgtgcacgttacaggctcggatcacttcgagcacctgtttcacgtaaattttggtcggcgtcaggagcacctcgcccaacacacggccgtccaattcgggataagccttgcgaagatccagtcctgcatcggcaaccaccttgcgcaccaggctgaaaccgttcgaatggacaccgctcgacgcgatacccaccaacacgtcgcccacacgcaccttcgtaccgtcgatcaggcgcgacttctcgaccacgccgcacgtgaagcccgcaatatcgtactcgccgccggcatacatgcccggcatctcggccgtttcgccgccgatgagtgcacagccggcctgacggcagccttcggccacacccgccacgatcgcttcgatcttcgcaggctcgttgtgccccacggctacataatccaggaagaagagcggctcggccccctgcgccagcacgtcgttcacgcacatagccacggcgtcgatgccgatcgtgtcgtgcttatccatctcgaaagccagcttgagtttggttcccacgccgtcggtaccgctcacgagcaccggttccttgacattcagcgccgagagatcgaacattccgccgaaggcgccgatgttacccatcacgcccaaccgcgaggtcgaagccacgtgtttcttgatgcggcgcaccacttcgtatccggcctcgaggttcacaccggccttttcataactttccgccataacaatagttggttttagctgtttcctgaatatttccacccgatgttttcgaaatacgcatgcaggacaggttcttccctgacacagcagatcgaaaacggagcggtttgtttaacatttttcttttttgttcgcctcctcgatcgtcccgtaaagcgacgtcggataattgcccgtgaagcaggccatgcacaactcgcagcgattgcccgccttcagcaaggcatcgggcgagaggtaagccagcgaatcggctccgatatactcgcacgcctccggaaccgacatacgggcgcacagcagctcctcgtacgtcgaagtatcgacaccgtaaaaacagggattcttgaacggagggctggcgatgcggacatgaacttccgtggcccccgcctcacgcaacagacgcacaatgcgccgggaggtggtaccgcgcacgatcgaatcgtcgatcagcaccacgcgctgccccgaaacgataccgctcaccgacgaaagtttcatccgcacgcccttctcacgcatcgactgcgacggctggatgaaggtacggccgatgtatttgttcttgataagtcccatctcgtagggaagaccgctcgcttcggcgtatcccatggcagcgctcaaactcgaatcgggcacaccgaccacgatgtccgcgtctgccggcgcctccttgtagagcaagcgtcccgactccttgcggaaggcgtgcacgttacggccctcgatgtcgctgtccgggcgggcgaaatagatgtattccatcgcacacatcatgtggcgcttgaacatcgaatagtcgctgctgcggatgccgtgccggtcgatcgtaacgatctcgccgggctctacgtcacgcacgaattcggcacccaccacctcgaaagcacaggtttcgctgctgacgacatagccgtctcccaacttgccgatcgaaaggggccgcagaccgtgtttgtcacggcaggcatagatgcggttagccgtcatcaccagaaacgcgaacgctccttcgagcatattgagcgcctcgatgatcgaatagatacggggccggttgtggttgcgtacctcctttttgataagatgggcgaacacttcgctgtccgaagtggactggaaaagactgcccttgttctccaggtagttgcgcagcagatccgcattgacgatatttccgttgtgggccaatgcgaaatcacccgtattatgatggaacagaaaaggctgtatattctccgttccgccgcctccggccgtcgagtagcggacatgaccgatagccatgtcacccgtaagagtcgatagtttcgcctcgttgaacacctccgtaacgagtccttcgccccggacacgccgcatcgccccttccttcgaaacgcttacgataccgcacccttcctgcccgcgatgttgcagggaatgaaggccgtagtaagtcaggttagctgcgtcgggcactcccacgacgccgaaaacgccgcactcctcgtgcagctcccggtcgcagatcggctgcattatgctctctttgtgcatcggaacttatttgattactttttccagacgggccaggatctcctcgtaagcctcgcgcaccttacccaagtcacgacggaagcgatccttgtcgagcttctcgttggtagccatatcccacagccggcaggtatcgggcgacacctcgtccgccagaacgatctcgccgtccgacgtgcggccgaactcgatcttgaagtcgatcaggttgatattcatcttggcgaaaagctccttgagcacctcgttgatccgggcggtcatggcataaatctgtttcagctcgtcgtaggttacgacacccagcgccaccgcatgatgatcgttgatcagcggatcgcccagctcgtcgttcttgtaacagatgtcgaaaatcacgttcgaaggcttcgttccctcctcgatacccagacgctgggccatcgagccggcgatgacgttgcggacgatcacctccagcggaatgatccgcacacggcggcacaactggtcgcggtcgttcagggtcttcacgtagtgagtcttgattccctgcttgttgagatattcgaagatcagggtcgagatccggttgttcagcacgcccttgttctcgatcgtggcctttttgatgttgttgaacgccgtcgccgcatccttgtagtgaatcaggatcatatccggatcgtccgtcaggaaaacctgtttggccttaccctcgtaaagcatttcgccttgttgcatagtggttggtattttataattgttattttgttttccggaaatagttcaccgcattcgtgaagatgtcctgcaccttctctccggcgatgttcttaaagaggttctccccgtaacgctccgtatggcccatcttaccgagtatctgcccgtcgcggctcacgataccctcgatcgcatagtacgatccgttgggattgtacggggcttcggccgtcacgcggccttcggcatcgacatactggaacgccacctgcccgttctcgaacagctcgcgggccaaaggctcgctcacgacgaacttgccctcgccgtggctcaccgcgatcgaatgaatgtcgcccaccgagaaactcgacaaccacggggagttggtcgtcgccacgcgggtcgaaacgatctgcgacacatgacggttgatgtcgttgcggaagagcgtcggcgactcccgggtcaccaggcccagccgtccgtagggcagcagacccgacttgaccagcgcctggaaaccgttgcagatgcccagaatcagaccgccccggtcgagcagacgatgtatttcctccgaaatatccttgttgttcagcacattggcaatgaatttaccgctgccgtccggctcgtcgcccgccgagaagccgccgcagagcacgaagatatggcacgcagcgatcgcctccttcatccggcggatcgaatcgaaaatagcctccgccgtcaggttgcagaacacctcgctgcgcacttcggcacccgcccggcggaaggccttcgcggtgtcgtagtcgcagttgctgcccgggaatacggggatgaagacctccggacgctcgaccgcctcgcccggataggtgaagctgcggggagccggcatcgcctccatgaccggcgcatggttgattcccttatcgggataaaccgtcgcaaagcgttcggtattggcccggtaaagctcctcgagcggcattttttcgccgttgatcgtgagcgctccctccgcctcggtatgtcccagcaactcggcggccggaaaatcgagcggctcggtgctctccaccacgatcgagccgtaggagttgtcgaacagcgtcgcttcatccaccttgacatcggcaccgatgccgttgccgaaagacatcttggccagcgcttccgccacaccgccgaagccgacggcatagcccgaaacgatcttgccggactcgatagccgaacttacgaaatcgaaattccgcttcaacgccccggtatcgggcatatggttttcgagcggggtatgacgcactaggtaaatcgaatggcccgccttcttgaaatcggtcgagatgacgcgtccggcatcgacagtcgtaataccgaaggccatcagcataggcgggacgttgatctgctcgaaggtaccgctcatcgagtccttgccgccgatcgagggcagtcccagttcgacctgcatcttcagggcaccgagcagcgccccgagcggcttgccccacgtacggggcgacttggtcatgcgctcgaaatactcctgataggaatagcgcatcttatcgtagcgggcacccgccgccacgactttggccgcagcgtccacgacggcataggccgcaccgtggtagggactccacgacgccaggaaagggttgtagccgaaggccataatgctggccgtatcggtatatccgtccgtcggcaacttctgcaccgacacttgtgtttccgaacgttgcgtacgaccgccgaaaggcagcagcacggtcgaagcgccgatcgtagaatcgaacatctcgatcagccccttctgcgagaggacattgtcgtccgccaggttcgcaagcatcttttcgcgcagcgtaccgcccttcacctcgcggcggaaaggatcgcgttcctcgaccgcaccgatcgcggcctgggcatagtgcttggcccctgcgctgtcgatgaactcgcgcgaaagatcgaccactaatttgcccttgttgtacatccgcatacggcgcgagtccgtcacgtccgccacatgggtcacttcgatattctcctcggcgcagtagcgcttgaactcctcttcggcactcgcttcgatcacaacggccatacgctcctgcgactcgctgatcgccagctccgtcgcattcagaccgctgtacttggtcggcacgcgatcgaggtaaatatccaggccgtcggtcagctcgccgatggctacgctcacaccgcccgcaccgaagtcgttcgacttcttgatcaggcgcgtcacttccggacggcggaacaaccgctccagcttgcgctcttcgggggcgttgcccttctgcacctcactgccgcacatctcgagcgacttgtcggtatgctccttcgacgaacccgtcgcaccgcccacgccgtcgcggcccgtgcggccgccgagcagcaggaccacgtcgcccggcacgggggactcccgacgcacgttttcggctttcacggcgcccaccacggcaccgacttccagacgtttggccacatagtcgggatgatacacctcgcggacgtgggtcgtggccagtccgatctgattgccgtagctcgaataaccggcggcggccttaaggctgatgacgcgctggggcagtttgccgggcagcgtttcgcttacgggttgatagatatttcccgcacccgtcacacgcatcgcctgatagacgtagctgcgacccgacaacggatcgcggatggcaccgcccaggcaggtcgaagcaccgccgaaaggctcgatctcggtcgggtggttatgggtttcgttcttgaactgcaggagccatttctcggtccggccatcgacgtccacatcgacgaaaacgctgcatgcgttgttctcctcgctcacctccaggtcgtcgagcagtcccttgctgcgcaggtaacgggcaccgatggtcgccaggtccatcaggcagacgctcttgccctcgcgccccagttcgcggcggattttcaggtaaagcgccagcgtgccttcgatctcgtctttcacgaacgactcctcgaccgtaatgttctccagctcagtcgtgaaggtcgtatgacggcaatggtcgctccagtacgtatcgagaatccgcagctcggtttcgaacggatcgcggccctcgttccggaaatatttgaccacttcacgcaggtcgtcagcattcatcgccagaccgttcttcttgcagtaggcatcgagttccgcatcttccatctcccggaacccgtccaataccggcaccggtttcacgggggcgttttccaaatcgtccaggacccgcaaatccttctcgcgcgactccacggcattgatataatagcgacgaatacgctccatcgtctccttgggaagtttcgaagggaagatcagcagcttcgaactcttgatcttcacctcggccgaaggatcgatcaaccgcacgcagtccacggccgaagccgctcgctggtcgaactgtccgggcaggcactccacagccagaaagctgttgccgcccagatcgcacgaatccgtcacggcatcggtaaccacctcgccgaagaccctgtaacggctcttctccagcaattcgtccgaaaaaccgaacaggtcgtacacgttcagcagccgcaggccgtcgagcgaaagattcaggttggcattcaggtcgcggagcaggctctcggcctcgacccggaattcggggtatttctcaacgaaaatacggtaactcttcattatcttatttttgactttatttcacaaatctgtcggcccacttggcggcatactcctcgccggtcacaccgacgaaagtcacgtgtcccatcttgcgcttgggcttggaaacggtcttgccgtaaatatggacatacacaccggggcgattctcccgagcaagcgcctcggcccgctccagatcctgtcccaggatgtttttcatcacggtaggggccttcagctgcggctcttcgaggggcatatcgagcaagtaacggcacagctcccggaactggttggtcgtcgaaccctcgatggtccagtgtccgctgttgtgcgggcgcggcgccatttcgttgaaatagacctcgtctcccttcacgaaatattcgatagccagaatcccccggtaaccgcagtcgcgcatgaaacgcttgctctgggacaccatccgctcccgcacctggtccggcatctccgccggcacgatgcacagatccagaataccgtccttgtggatattccgccctaccgggaagcagatcacgcgctcgccgtccgacaccagcaccacgctggcctcgaaatcgaacgggacgaactcctccagaatgcagggcaccgcgagcagttcgcgggctttcgcaaggtcggcctcgccgcgaagcaccgcctgaccgtgtccgtcgtagcccagcgtacgggtcttgagcacgcacggataaccgattcgcgcaatggcccgatgcagcgactcctcgtcatcgacagccatgaaagcgggcgtcttcaatccatgatcgcaggcattgctcttctcccgcaggcgatcctgcgagtcgaacagaggcctgaacccttgtttgatattgtatttttgctcgagagccaccagcagattgcccggcacgttctcgaactcgtaggtcaccacgtcgctgcggcggcaaagctcttctaacgccgccggatcgtcgaaccggcccacgatccgctcgtcgctgatcttaaacgccggagcatcctccgccggatcaaggcagatcgtccgcgcacccagcagatgcgcctgctcgatgatcatcagccccaactggccgccaccgataattccgatcgtcttcaccgcactcatcggtctaaagttccgctttaagtacatcctcagtctgtttcgcacggaacatctccagacgggccgccagcgcctcgtccttcaatgccaggatcgacacggcgatcagggccgcattcttcgccccgttgatcgctacggtcgcaaccggcacgccgccgggcatctgcacgatcgaaagcagggaatccagcccgttcaaggctcgagatttgaccggcacaccgatcaccgggagcgcggtcatactggccaccatgccgggcaggtgcgcagcgcctccggctccggcgatgattacctccagtccgcgcgacttggccgttttggcatactccaccagcaggtcgggggtgcggtgggcgctcaccacccgcttctcgaactccacaccgaattgcgcgagcgtcgccgcagcgtcggacataacgtcccagtcgctggtcgaacccatgattactccaactttcatagtaagaaacgtactaaatcaaccaaaaaagagccgctacgacagaattcgtcatagcggcaagattatattgctgcgggaagccgattcgtgccctcctgcatagttccgtcgataaaatccgatgcaggaacgacactgcacgctccggccgcacatcgagccgacagcatctgctgtcgctttcgccgggtatggtgcatctgaatcctttccatcgtttcggaagtcgtagccgccgacggacctgcggcccatcgccttttactcgcacaaaagtacgaataatttcaacgacaacctaacaatcccgacagttttatttcgacattgtatcgacaaaatccgctaccggattttcgcctcgcaataagcgcagcggcaggtgtctcccgctttgacaaaaagcggatcgacatcctccgtagccgaaatacaccgggagttggggcatttcatactccggtctatgaacatcccctcggccaggtcggggactgcggcgagcttctcgccttcggcccatttcagcaacgtatagatcagagccatgcgcacgaacttaccgttctcgacctgccggaaataggctgcccggggatcgttgtccaccgcacgcgtgatttcgttcacacgaggcagcggatgcagcacgatcatatccgacttggccgtgcggagtttcgacggatccagcacaaaactgtccttcacgcggttaaactcctcctcatcgaggaaacgctccttctgcacgcgggtcatgtagagaatgtccaactcgggcatcacctcctccatcgtcgatacctcgcggaattccaccccttcggtctgggtttcgatctcatgaagcatatactcgggcaaccgcagctcgtcgggggcgatcagcaccacccgaatcccttcgtagcgcgacatcgccttgataagcgaatgcaccgtgcggccgaatttcaggtcgccgcagaagccgatcgtcaggtgatccagccgccccttctcgcgcttgatcgtcagcaggtcggtgagcgtctgcgtcggatggctgtggctaccgtccccggcgttgatgaccgggataccggcatactgcgagccgaccagcggcgccccctccttgaaatggcgcatggcgataatgtcggcgaagcaacgaatcacccggaccgtatcggcgaccgtttcgcctttcgacaccgacgacgaagcggcgtccgaaaaaccgatgacgctgccgccgagctccagcatggccgaagtgaaactcagccgcgtgcgggtcgaaggctcgtagaagagcgtcgcaagttttttgcccttgcaggcttcgctgtatttggcccggttggcgatgatgtcttccgccagggcgatgatctgcccgatctcggcgaccgacagatccgtagggtcgattaaatggcgcatagcggtttatttgttgatccagctttcgtccgaaggattgtcgcggaaggcgatcaggcgctgccgatcctccggcttgatatacccctcctcggccgctacttcgaccagcgcatcgagattcgaaaggctatggttgattacgtcggctgcagcaagccgcaccaaccctttcttcataccgtacgtaaaaatgctcaccacgcccagcacctcggcacccgccgcacgcaacgcctcgaccacttcgatgcacgatcccgccgtcgaaatcaagtcttcgattaccacgactttctggcccttttcgagtttgccctcgatctggtttccccgaccgtgatccttcgagccgctgcggacatatcccatcggcaggtcgaggatcgtcgcggcgatggccgcatgagcgatgcctgccgtcgatgttcccatcagcacctcgcacgcggggaatttcgccttcaccgtttccgcaatcgcggcctcgaccttcttccgcacctcgggggcggtcagaatcaaccggttgtcgcaataaatcgggcttttgataccgctcgcccaggtaaacggctgctcggggcgcaggaataccgcaccgatcgagagcaggcctttggcaatttctctttccataactatttctacattctttagattgtcattcctttttccgcaaaaacggctttccgcctatcgctcgtcgagggccatacggagtacggcctccacctcgtcgggcataataccgccctcgtgcactttcttgtccccgacgtaaaatgtcggtacgtaatagtagtcgtaacggtcggccacttcgggttcggccagttcgtcgatcatcctgatttcgatgcggccgtaaggttcctgccgctgcagttcctccagatagcccagcgccttcttgcagaaggggcaccggggctgatagaaaagtgtaaccggtttcataacttccttgatttagagtaaaacttatttcccgcttgcagcgataatcagcttcttcggtcaccgcaattcaccgcgcattcccttcacacgatccggcaactcccgtgccgaccgaagttccgcgaactccacgctcccaaacccattttagacaactgccgcacgacacgaatcccgtccgcatcgctcgatccggaccgcaaaacagcccctcctgccgtaccgtccgaaatactcccttctgtcgcacactctatttcacgaactcctccacgcaccggcgataggccgccacgggatcggctgccgccgtgatgggacgccccaccacgatatagtccgagccgatctcccgcgcacgcgcgggagtcgtgacccgcacctgatcggccacctctccgtccgcaaaacgcacgccgggcgtgacggtcaggaactcccgcccacaggccgccttcaccataccggcctccagcggagagcagaccacgccgtccaaacccgcttcgcgggtgttctgcgcatacttgacgatcgtatcgttgatcggcgccgaaatgagcagctcgcgctgcatacgctcctccgaagtcgaagtaagctgcgtcacggcgatcagcagcgggcgcgtgccgtccggacgggtcagcccttcgatcgccgcacgcatcatctcgatcgtgccggccgcatggacgttgcacatgtccacgtcaaggcgcgaaagcacggccatcgccttcttgaccgtattgggaatgtcgtgcagtttcagatcgaggaaaatccggtgcccccggcgcttgatctcacgcacgatttcgggcccttcggcatagaaaagctccatgccgatcttcaggaaaggtttgcgggcctcgttcttaaacagatcgaggaaccggaaagtctcttcggcgctgctgaaatcgcaggcgatgattacgtctctgttggtcatatctcttgcttctttataattttcacaaaattacttcacgatgccgataatatcggacagccgttcgatccccagccgctccatttcgcggggcaatgcctcgacgatctccttgcaggcataagggttccgcaggttggcggcccccacctgtacggccgtcgccccggccatcatcatttcgataacgtcgcgggccgtttccacgccaccgcaacccatcaccggaatccggcaagcccgggctacctgataaaccatccgcacggccacggggaagatcgccgcaccggaaaatccgcccataacgttggcgatgataggcttgcggcatttcacgtcgatccgcatgcccagcatcgtgttaatcagacagatgccgtcggcccccgcctgctcgcacgcccgggcgatcgccacgatgtccgtcacgttaggactgagcttgatatagaccggcttggtagtcacggctttcacggcacgcgttacctcggccgccgcttcgggcgacgttccgaagctcatgccgccgtgccgcacattgggacagcttacattgacctcgatcaaaccgacctgttcctccttgtcgatccgctcgcagcaataggcatattcctcgaccgaaaaaccgctgatgttggcgatcaccggcttgcggaagaatgtcttcagccggggaagctcttcgccgatcaccgcatcgataccgggattctgcaacccgacggcattgatcatccccgccgtacactcggcgatgcggggcgtggggttgccgaagcgtgcctcgcgcgtagttcccttgaaggaaaacgacccaaggatgttgatgtcgtaaaaatccttgtactcgttgccgtaaccgaacgtaccgctggccggcacgactggattatccagccgaaggccgctcaacgtcaccgacgtatcgaagtttttcttgggttcgtttaccatataatctcctcctttttcagtacgggtccctccttgcagatgcgtttggccccgtttttcgtctgacaggaacaacccatgcagccgccgaagccgcagcccatgcgctcctcgaaactcaattcgcccggtatgtcgcccgtcgcatcgctcaatgcacgcagcatcggcagcgggccgcaggcgtaaaaataatcaaaatccggcttcttttcggcgatcgccgtcgttacgaaaccctttatcccgtgcgtgccgtccgccgtcgttacgaaaacctccgcaccgagcgcccgaaactcctcctcgtagaaaacctccgacgcggtattgaagcccaacaccacagtcacttttctgcccttgtcaatcagtttcttggccaggttgtagaggggcggaacgcccactccgcctccgaccaacagaggcctgcggcactccgcatccggatcgaacccgttgcccagtccggtcagcaggtcgagcttttcgccggtcttcatttcactcaaccgggccgtgccttcgccgacgaccttatagatcagtgtcagcgtccgctcgttgtagtcgcacaccgaaatcggacggcgcaggtagagcccttcaacctcgatattgacgaactgcccgggacgggtcagatattgcgtatccccttcgagcgtcatccgccagacggagggcgtcagcggttcattggccgtaacagtatatatgccttttttatacattttttcttttccaaactatgtgcttcgctttcgtcttaatttcaaaggagccggtttcgcaccgaccgacgcaggacacggcaagagcatactcgctggtatgggactgtcgcggactgcgaggaggtgcgaaagatgccctctgaacgaaactcgcttttgatttcaggccggcaaatgcggtgcatcgtgactttgaagcagatggggaatactatccgtctttcccattcgaatcaaagagggatgtgacgcagttgccgcatgaaatcgaaaactattcggcatcaatggtcgaaacacccagggttatctcctccaatacatccagcaggacctttaccgtttcgagcgccgtgaagatcgtcacgttgttctcgacggccgtgcggcgaatctcgtaaccatccagccgggtgttgtgctggttgatgtcgatcgtattgatgacatagctcacatggccctggcgcagcgagtcgatgatctccgtactgccttcgctcaacttgcggcgcgtacgggtgcgaataccatgctgacgcaggaattccgccgtgcccttcgtcgcctcgatattgaaacccaggtcataaaagcgccgtaccagcggcagcgcatcctgcttgtccttgtcggcgatcgtgaggaagatcgtaccgtagttggcgacggtcatgcccgacgactggagcgccttgtagagcgcccgggtgagcttgttgtcgtatccgatcgcctcgcccgtggatttcatctcgggcgagaggtaggactccatgccccggatcttggcgaacgagaaggccggggccttgacgaaccagcgggagcgctccctgccatatacttcggtaatgccctgctcccgaagcgaatgacccaggatgacccgtgtggcgatgtcagccatcgggacacccgtcgctttcgaaaggaacggcacggtgcgcgacgagcggggattcacctcgatcacatatacgtcctcttccccgtcgaggataaattggatattatacagaccgacgataccgatccggcggcccagccgcacggtataatcgatgatcttgtccttggctttctggctcacgctgaaggtcggatagacgctgatcgagtcgccggagtggatgcccgtcttctcgacgtgctccatgataccgggaatgaagacatccttgccatcacagatggcgtccacctccagttcgcggcccataatataacgatcgaccagcacagggctgtcctcattgacttcgaccgccgtctggagatagtggcgcaaacgctcctcgttcgaaacgatctgcatggcccggccgcccagcacgtagctcgggcgcaccagcaccgggtagccgatccgttcggcggctcgcacaccggcttcgatatcggtcacggcctcggcctcaggctggggtattcccaactcctccatgatcttctcgaaacaaccccggtcttcggcattccgtatcgcctcgacacccgtaccgatgatcggcacacccagttcgtgcagcggctcagcgaggttgatcgccgtctggccgccgagcgacacgacgatccctttcggtttttcgagcgtaataacgttcatcacgtcctctacggtcagcggctcgaaatagagcttgtcgctggtggtatagtccgtcgaaacggtttcgggattgttattgatgatgatcgcctcgtacccggcggcgcggatcgaccagatggcatgcacggtcgaatagtcgaactcgacgccctgcccgatgcggatcggtcccgacccgagcaccacgatcttctcgcgttcgctcacgatcgactcgttctcctgctcgtaagtggaatagaaatacggcacataggaggagaactcgctcgcgcaggtatcgatcatcttataaaccgggaaaatattgtgctcgcgccgcagcaggaacatctccttctggctcatgccccacaactgaccgatgaacttgtcgctaaaacccatgcgtttggcgtcgcgcaacgtttcgatgtcgcggggattggccgctacgaccttttcgaactcgacgatgttcttaaacttctcgaggaagaacatgtcgattttggtgctgttgtagatcagcgccagctcgacgccccggcggatcagctcggcgatggcgtaaagacggtcgtccgttccctccttgatataggagagcatccgatcgaccgtccagtcgtcgaatttcttatggtagatatggcagacccccgtttcgagcgagcgcaccgccttcaggaggctctcctccatcgtgcggcccacggacatcacctcgcccgtcgccttcatctgggttccgagctggttcgaagcgtcgctgaacttgtcgaacgggaagcgggcgatcttggtaaccacatagtcgagagccggttcgaagctggccggcgtattggcgatgcggatctcgtcgagcgtaaggcccacggcgatcttggcgctgacgcgggcgatcggatagccgctggccttcgacgccagagccgacgaccgcgacacgcggggattgacctcgatcaggtagtagttgaacgagaggggatcgagcgcgaactgcacgttgcagccgccttcgatcttcagggcacggatcagccgcagggcgctgtcgcgcagcaactgatactccttgttggtcagcgtctggctcggagccaccacgatcgagtcgcccgtatggacgccgaccggatcgatgttttccatattgcagatcgcaatggccgtatcgttgtggtcgcggatcacctcgtattcgatctccttataccccttgatgctcttctcgatcagcacctgatgcaccggggagagggaaagcgcattgcgcatcatctcgcgcaactgcgtctcgtcgtcggcgaagccgccgcccgtaccgcccagcgtaaaggccggacgcaacacgacggggtaaccgatccgcttcgccgcctcgaccgcctcgtcgatattgttagcaatcagcgacggcagcaccggctcgcccagcgactgacaaagctccttgaagagttcgcggtcctcggcctgctcgatgctctggaacgaagtacccagaatctccacctgacactcctgaagcacgcctttcttggcgagctgcacggccagattcaggcccgtctgcccgcccagtcccggcacgatggcatcgggacgctcgtaacggacgatcttggccacgtactcgagcgtcagcggctccatatagactttatcggcaatctgcacgtcggtctggatcgtcgccggattggaattgaccaacacgacctcgtacccctcttccttgagggccagacaagcctgcgtacccgcgtagtcgaactccgcagcctggccgatcacgatcgggccggagccgatcaccatcactttcttgatatccgttctcttaggcattttgactctcctccatcattttgataaacttatcgaacaaataggtgctgtcctgcggaccgggcgcactctccggatgatactggacgctgaaaatccgatcggcgcggcattcgacgccttcggcggtatcgtccagcagattcaggtgcgtaagggtcagtccggtgcccttcagcgactccgtatcgaccgcaaaactgtggttctggctcgtgatctcgaccttgcccgtttcgaggttcttcacggggtggttgccgccgcgatgtccgaacttcatcttgaaggtgcgggctccgtaagccagcgaaatcacctggtgtcccaggcagataccgaagatcggcaggcgcccccgaagcgtgcggaccatctcgaccaccggcattacgtcggtcggatcgccgggaccgttcgagaggaaaagtccgtcgggacggaaagccatcacctcctcggccgtaatatcgtagggcaccaccgtcacgttgcaacccttctcgttgagcttgcggatgatgttgtgcttgatgccgcaatcgaccgccaccacgtcgaaacgatgattggccgtgcgggagaaccaacgcttgcggcagctcacgcgctcgaccatgtcgcggcgcacgggcgcctccttcaagcggcgcagggcctcctcctgcggcatcgacgcatcgacgacgatcacccgctgggtgccctcgtcacggataatgcgcgtcagcatacgggtatcgatcccccagacgcagggtatgccgtactcctcgcatacttcgccaagggtcttggtatagcggaaattgctcggcagatcgttgtattcgcgcacgatcataccgccgatagtcggatacttggtctcgtaatcctcgtccgtaatgccgtagttgccgatcagcggataggtcatcacgaccatctggtcggtataggagggatcggagagaatctcctggtagccgaccatcgaggtattgaacacgatctcgcccgtcgcctcccggtccgcgccgaaaccgtagccgtagaactcgcggcccgactcaagcacgatttttttggtgaatggtttcatattcggttatttcgtaatttgtcttcgttcatttttcaatttccggccctgtttcccgcatccggcagaatccgcgacgaccgcagtcaccgcccgtcgaaaaacggaatcgcatttcgtattccgatccgggacaatccgcgcacatcgctcccgccccgtctatcggaaacgctccgtcgcgtatgccgtacgtcccccgaccagcgtccagagcgtacggcccgcaacccgccagccggcaaaaggcgtagcacggcctttcgacaggaaggtttcgggatcgatctcgtactccgcatcgaggtcgaacaccgttaaatcggccggttcgcccgcctgcaagcctccgccgaggccgaaaatccggcgcggagccatcgacatccgctcgacgagctgctccagcgtaagcagccccggcttcaccaaataggtatagagcagcgggaaagcacactccaaccccacgatacccatcgcgctgccggccagtccgcgcgatttctgttcggcggtgtgaggcgcatgatccgtagcaatcacctcgatcgtcccgtcggcgacggcctgccgcagggcttcgcggtcttcacgtccccgcagcggcggattcatcttgaaacgaccgtcctcctgcaaatcctcgtcgcagagcagcaggtagtgcggagccgtttcgccgctgactttcaacccggcggccttcgcccggcgaatcagctcgacgctctccttggtcgaaacgtggcagacatgatactgacatccggtttcggctgccaattttatatcgcgctccacctgccgccactcgctctcggagcagatacccttgtgcccgtgctcgcggcaataaacaccgtcgtggatataccctcctttcagcaattcatcgacttcgcaatgggccacgatcggcttgccgaccgctgcggcgcgacgcatggcttcggccatcagctcctcgccctgcaccccccgtccgtcgtccgagaagcccacgacctctccggccagagccccgaaatcgaccagctccccgcgtcccttctgtccccgcgtaatggaaccgtaaggcagcacccgaacgaccgcatcgcggcggatcagagccagctccgcttccagatgctccggcgaatcgggcgccggattgagattcggcatcggacaaacggtggtataacctccgtgcgcggcggcagccgtacccgtcgcaatggtctctttctccgaaaaacccggttcgcgcaggtggacatgcacatcgaccaatcccggcaatacatgacaacccgtcaaatcgactgcccggtcgtccgcctcaagcgcgacccgaccgcctatagcaacgattttaccgtcttcgatcgccagatcgcccgtttcgaaccttccgtcccgatagaacttcgcacctttgagaatcgtcttcattttgctgtaccgtttcgcacctcgccgcagcgggtgcacaaaaaaatagggcaacttggacagctaccctaataacttggaaaaattataataaaaattggaaatattttccgaatgattaccccggaaatgacggcgccgtacgtactgggcctcctgaaatgcgttcggtatgaaactaaacattggcttgatcgggttccggtgttatcaggggcaaaggtaagcataatttacggtttcggcaagataacccggccaaaaaatttcgccggcatcctgcaacgacagaacgatacgccccggcagaagtttcggtccgcgctccgacgcccgtccacccgaccggacggccatcgagcgttcctccggaaacctccgcccccatcccccaccggaaaaagcacggccttatcgaagagcggggaggggcgttcaacgctcctccccgctctttccggccgatccgaatcaataccggttgcgcccgtaaccgccgccctgattggagccgtaaccaccccggtcgctgcgctcggtcttcggacgggcctcattgacgttgatagcccgctcgtcgagctcgaaaccgttcagcgcgttaatcgcgttccgtgcggccgactcgtccggcatttcgacgaaaccgaagccgcgcgagcggccggtttcgcggtcggtgatgatgttggcggaagatacttctccgtactccccgaataaagtctgcaaactctcgccccgggtgcggaagttcaaattcgatacgtaaatgttcatttttttctattttgactgtggataaatgtttattgcgcaaatgcgattttcaccgcattcataccgcgtgtaccccgcatgagttcgaaaaggacaatccgcccctcgccgatcccttcgggagccgaagatatatggaaaaaatatttttccgtcgaagccaggtccttgataaacccgtaccccttctcggtattgaaatactcgacacgccctttcagcggttcggccgcaatatcttcctttttaggcgtggctatcacgatatcctcgagctggatctcgactttcggccgcagctggggcggagtgtcggtaatattcccgttctcgtccacataggcgatcatatcgtcgagcgaggagcttcctccggcctggcgttcttccctgcgtttctgtttttcgaagcgcttggcctgctttttcttttcgttctctctttttccgaatgtttgcgattttgccattaaattcaacttaaagattattatgcacggtatgtttccgcattgagttttttgcctgtcagccgctgtatgtctttcatgagcggccgctcgtccggggtgcagaacgtaagggcggttccggaatgtccggcacgaccggtgcggccgatacggtgtacgtacgtttccggcacatccggcagatcgtaattgatgacgatctccagttcccggatgtcgatgccacgggcagcgatgtccgtagcgaccatcacccggatcttgccggacttgaaatccgtgagtacgcgctggcggtgattctgcgacttgttgccgtgaatcgcctcgcttcgaatacccgacttggagagcagacgcgaaatattgtccgctccgtgtttggtgcgggagaagacgagaacggacttatcctcctcgcggagcagagatacgagcagtttcttcttctccggcttctccacgaaatagacccgctgatcgatcgcagccaccgccgacgaaaccggagtcacctccacccgcacggggtcggtcagcatacttttcgagagcgccacgatgtccgcaggcatcgtcgccgaaaaaaagagggtctgacgcgacttcggcagcagcggcagcagacgtttgatgtcggcgacgaatcccatgtcgagcatccggtcggcttcgtccagcacgaaatgcgtaatcgcgtcgagttcgacgaacccctgtccgatcagatcgtgcaggcgccccggcgtagctatcagaatatccacgccgccacgaagcgcctcgacctgcgggccttgtttcacaccgccgaaaatcgtcagatgcttcagaccgacatattttccgtaatccgaaaaactgtcgccgatctgcacggccaactcccgggtaggggtcaggatcagggcccggatcggccgcactccgtattcccgaccatgattccgcccccgccggttgcggcgcggcacgtcggtcggctctgcctgcatcccactgctcaaatgctgcaggatcggaatggcgaacgccgccgtcttacccgtcccggtctgggcgatgcccagcatatcgcgcccatcgagcgccacgggaatacccttttgttgaatgggcgtaggagccaggtatcctttttcaccgatcgccttcaaaatagggtcggtaattttcaattcgttaaatgtcataatcatcgtataattccgtcgtacgacggagttttcatctgtcgcggaggcatccggtgcggaagcggaaaaacggaagcgaggaagtttcctgttcccggtcgaaaccgcagtcacgcacaccttgttccccgacagcgcaatctgcccgaaccacgctgaaaaagggcggtcagaacgggcgtatgcaagtaaaaaaataatctcaatttcgggacatcgttaaaacccggcaacggctctcttctgcctgcgacagacatactcaagcgaaattgcctaaacaaagaaagtttacaaaggtcgatttcaacgatggaaaaatccggacgggatataggtccgggaaaatgcaaagaagataaagatcagaatgaacctgccttgtttattgggtaaaggtaacaattattacaccattcgcaccatcttttccgaaaaatatcgtccacttccaccctaaaaatacatataacactacttatcaacaaattaaataaaatttcttcaagaataatttcatcgtgcactgcgctcgatattttcaagcgccgcaaaaaaagaccggatcgggaaaacacgcgactcgccgggaatagtgatcttctcctgccgaaagtagtgaatcgatcgccatacgacgggattttcacacaacgcacactccttattcgatgttctccggcaaagaaaggataaaattcactaactttacggcaaataggcagcccccggccgcttccgacaaaaccgaaccttccgcgtgcacgatctttacagaaaacaggcggtgcctcggttgcatctaaataaatttgactcggcttccggcttgcactatctttacagaagataagcggcgcctcagctgtaaccaaataaatttgacacagctttcggcttgcactatctttgcaaagaccaactgaaaaacagtattcgagatggctcacactctttttgtacccctgatgctcacccttggcgccggcctggcaaccggtatcggcagcacaatagcccttttcgctcaccgtaccaacaagcgactgctttcgttctcgttgggactgtcgggcggcgtgatgatctacgtttcgttcgtcgaactgttccaacaggcacgggaggctatcggagccatctacggaccccaaaccgggatgggtattacgaccctggcctttttcggcggcgtactgctgatcggcgtcatcgaccggttggtgccttcggtcgagaacccgcacgaagcccatatgatcgaagagctggagaagaaaccgaaaaatgccaaactgatgcgcatgggactgatgaccgccctggctatcggcatccacaacttcccggaaggcatcgccaccttcgccaccgccgtcgaaaatcccacgctgggtatcgccatcgccgtcgccattgccatacacaacatacccgaaggtatcgcggtttcgatccccgtcttttacgccaccggcgaccggatgaaagccttccgctattcgctcctatcgggtttggcagagccggtcggcgccctgctcgcctattttatcctcatgccgttcatgtctcccgtcatgatgggctgcatcctggcaggcgtcgccggaatcatggttttcatctcaatcgacgaactgctgccggccgcccgcgaatacggcgaagcccacatctcgatctacggcgtgatgagcggcatggcgatcatggccctcagcctgatcctgctcggataaagtatgcggcgcgattatatactttaatgtacctcttcgaaagcacagcaccccaaatcccctccgggaaaaggatgcaggcaaggggcgaattataaacgcggccacaagcccgcgaataaacgtcccttcggattcgacgctgcaaccgtcgaataaagggccacgaaagatatatctcaatcaatatactgccctccgatccgaatctgaccgacaatgctcggacgtttctcgcgccctcccaagaaaaaagttcagggtgaacccggcatcgaataacggcccgcaaaattgcggctaccgccgaattcaaaaaaaacggtcgcatataataccataatttaacagatctcggtaaagcctttcggcctaccccgtacatttcatcctcaacgccccctgccccgaatcatcgtaaaatttcaatttttcaggcattttatttggtttataaaataaagtagtttatatttgtaataccaacaaaaaccgaaagctatggaaacaactcgaaaaatcgatgcgaaagccgcacgcagaaagcgccggctcatccgggaatggataacatacgcagtaatttgtgcatttctggccggagtcaatgccctcacgacgccccactattggtgggtgctgtgggtcatggcaggctgggggctcggtcttattctggatctgatattccacctgacaaaactctcggacgatgacgatgcggagtgatccgccgacggtcggaccgcacgaaaaaactcgatttccgatacggtcggacaacagcccgaaatcattcggggcgagggatgccttgtaaacacagtcaaaaacggctgccaacgaacggatacccgaatctgcaaagaaaaaagcggcatgctaaaatatataatcatcaaaactcactgcgtatggaagagagaaaattagacgcacgagagagtatggaactcatctcgcgcatgattcaaaacacccgcaaccggctggaaaaccatgcgggacgcccgttcctcgtatggggctatacgaccgtcgggatcgccctgctcaattactggttcaacatcgccggatgccatcccgcctggtgcttcacctggtttctcattcccatcatcggctgtctgctgatgcggctgttcccggacaagaagccgacggagccccgcacagagatcgaccgcatcgtcggcaatgtctggttagtatcctcattatcattgattccgatcttcctcttttcgctatttcacggactctcctaccgacacagtcttttcgaactcattacactggtgatggctacggcaacggcaacaaccggaatgatcgttcgttcgaaaatatacatcgtcgcaggacttacctgtatggctctttcagtcctcttccctttatacgactatttcctgaaaaaaatcgcaacttctgacggaattgagataaccgccggactcctgaacaacgaaatccttatctttgccggcgtatttttcatcatgatggtcgtcccgggacatatcatcaactaccaatcgcacaaaagatgttcaaggaactgaatcccctgctgcactcggaactgcgcctggcggtaatgtcgatcctcctcggggtcgaagaggccgacttcgttttcatccgggaacagacgggagcttcggcgggcaacctgagcgtacagatcgacaaactgcaaaaagccggctacatcacggtcgaaaagacctttcggggaaaaataccccgcacgctctgccgcattaccccgacaggcgtggatgctttcgaggagtacgtcgaagcgttgaagagctacataaaaaagtaggaaggaaaacagattctcggctccggcggcgacaacgaccggttcggaatggggcataaaggtcgttatgccccatattttcaaccccgacctcgaatccggccgaatcgccagccggcaatctcccggcgggcctccttgctgcaacgaccggaaaggcgaacagcgtaaatcagccgcagccccgcaatttcggcgagtttcggatcccgccatacgcaaacaagcccggagtttcgctccgggcttgtttgcatctattcttcaaacgattagtcctcgaacttcgccgagaggaactcccggttcagacgggcgatgtgcgaaatcgaaatcatcttcggacactcggcctggcaagctcccgtattggtacagttaccgaagcccagttcgtccatcttggccaccatcgccttggcgcggcgggcaccctcgacacgtccctgcggcagtttcgcgagcgacgacacacgggcggcgacgaaaagcatcgccgagccgttcttacaggtcgcagcgcaggcaccgcaaccgatgcaggcagcggcatccatcgcaacgtcggcatcggccttcgggatgggaatgttgttggcatcctgcacggcattcgtacggaccgagatgaagccgccggcctgaagaatcttatcgtaggcactgcgatccaccacgaggtccttgattacggggaaagccgccgaacgccagggctcgatgacgatcgtcgccccgtctttgaaacggcgcatgtaaatctggcaggtcgtggcgccgtcgcccgggccgtgcgcacggccgtcgatgtgcagcgagcacataccgcagataccctcgcggcagtcgtggtcgaacgccacgggctccttgccctcgtggatcaggttgttgttcagaatatccagcatctcgagaaacgaggtgtcggcggagatgttctcgactttgtaggtttcgaatgccccttttgccttggcgtctttctggcgccatatctttaacgtgaaattcatagtttcaaattgtgtattaaagttagacgacagaagaattagtccttgtagttacgctgtgcggggtgtacgaactcgaagttcagcggctccttcgtgagctccggcgcttcgttctcgcccttgtactcccacacggcggcatatacgaagtgctcgtcgtcgcgtttggcctcgccctcttcggtctgatgctcgacgcggaaatgtccgccgcacgactcctcgcggttcagcgcgtcgcgtgccatcagctcgcccagctccaggaaatcggccagacgcagcgccttctccaactcgacgttgaactcgttcgccttgcctacgaccttcacatccttccagaactccttgcgcagcgcctggatctcgacgatcgccttctcgagcgactccttcgaacgcgccatgccgacgttctcccacatgatgtgtcccagcttcttgtgaatatcgtccaccgactgcttgccgttgatggaaagcaacttcgaaatcttatccttcacacccttctctgcctcgtcgaaggccttggtatcggtcttcaccttcggagcctggatcttgtgcgacaggtagtcgccgatcgtataaggcagcacgaaataaccgtccgccagaccctgcatcagcgccgaagcacccaggcggttggcaccgtgatccgagaagttggcctcaccgatggcgtagagacccgggatcgtagtcatcaggttgtaatcgacccagataccgcccatcgtatagtgtacggcagggaagatctgcatcggctgttcgtagggatttacgtcggtgatctcctcgtacatgtcgaacaggttgccgtaacgttgtttgatgacatccttgcccagacgctcgatcgcggtcttgaaatcgaggaacacggccaaccccgtttcgttcacgccgaagcccgcgtcacaacgctctttggcggcacgcgacgccacgtcgcgcggcacgaggttaccgaaggccggataacggcgctccaggtagtagtcacggtcctcttcggcaatatccgaaggtttcttggcacccgaacggagggctttcacatcctcgatctttttgggaacccagatacggccgtcgttacgcagcgactccgacattagggtcagcttcgactgctgatccccgtgcaccggaatacaggtcgggtggatctgcgtgaaacagggattcgcgaagccggcacccttgcggtagcactggaaagcggccgaaccgttcgaagccatcgcgttggtcgaaaggaagaacacgttgccgtaaccgcccgaagcgatcactacggcgtgtgcgccgaaacgctccaattcaccggtcaccagatttcgggcgatgatacctctcgcctcgccgtcctcgatcacgatgtcgagcatctcgtgacggggatagctcttcaccgaaccggcagcgatctccttgttgagtgcggcataagcgcccagcagcaactgctgaccggtttggccgcgagcatagaacgtacgcgaaacctgcgcaccgccgaacgaacggttgtccagcataccgccgtactcgcgtgcgaacggaacgccctggccgacgcactggtcgatgatgcagttcgaaacttcggccatgcggtaaacattggcttcacgggcgcggtagtcaccgcctttgatcgtatcgtagaacaaccggtaaatcgaatcgttgtcgttgcggtagttcttggccgcattgataccgccctgcgccgcgatcgaatgcgcacggcgcggagagtcctggatgcagaaaaccttcacgttgtatcccagttcgccgagcgaagcggctgcggaagcaccgcccaggcccgtacctacgacgataatatccagtttgcgtttgttggcagggcttactaccttgatcgccgccttgtggttgctccacttttgcgcgagttccccggcgggtatttttgaatctaatttgaaagccatatctctatatttttataattcaacgtaagatgttagcagacacaaccgcagcaaagactccggaagaaatagaccagcacgaccacggcgaaaccgaggaacacgacggtcgccacgatgttggcgatacatttcaggcgcggataccagatgtcgttgccccagcccaccgactggaacatcgaccacacgccgtgcgtaaggtggaaccagagggcgaagaaccaaaccaggtagatcaccacgtagtaccactgcgagaaggtgtactgaatcagcgcagcgccgtcctgcggcgagaagccgagcgaattttcatggtgtcccagcacctcgaccagctgcatcttcgaccagaagttgaacagatggagcaacagaccgccgaggatgatccatcccagtgcaagcatgttcttcgacgcccactgcacacccttttccttcacggtaacggcataacgctgcgaaccgcgtgccttatagttgttcacggtcagcaccagcgcataaatgaagtggatcaggataccggcgaccagcaccagcgttccgaccaacgcataccagttggcacccaggaatgcgcagaccgtgttgtacgcctcgggcgagaagatcgccacgatgttcatcgacatgtggaagaggataaagagcacgaggaaacaaccggtaatgctcattaccaacttcttgccaagagaagaattagttagaaaacagcccataatgtttgaaatttgtttatttttgttaaaaatttgtttgcgcttcggcaaagatagtcattgtttgcataataacaacacaaaacaattcgaaatttacgcttaaaatcaggcattttatgaccaaaacggaaatccggaaacagatgaaagggctcaatacggccctttcttcggaacagcgcgaagagctttccgcacgtattttcaacgaagcggagaggcttccggccttcgcacgcgccaaagtggtggcccttttcgcttcgctcaaagacgaacccctcaccgccccggcactcgaacgctggagccgctccaaacggatcgtgctgccccgcgtggaaggcgacataatgcgattctacgattacgatcccgcctcgatgaacgattccggctcgttcggcatttcggaaccggaggccacagcgctgtgccgccccgaagagatcgatttcatcatcgtgccgggcgtggcgttcaccgccgcaggcatgcgcctgggacgcggcaagggattctacgacaaatacctgtcgcagccgggtttccgggctttcaaggcaggcgtgtgctatccgcatcaagtcgtggaggagctgcccgccgatccgttcgacgttccggtcgatcacctttgctgcggacggtaaaacgagtgccgactttggtcccataatcaaatcctaccgttcccacgtgttctccggcccgaagacgtaccccttcgggattccgccatcgaaaaccggcaaacaccggttacggcaaagaatcgtaaaaagagaaaacaccgcatcaaagaagcctgcatctaccgatgcaggcttcttaactaatatcatacaatattattatcggtagagatactctcccggaatgcggtggctgcgccgcccgatcggaacgccgatgccgagcgtcacgttcatcgaagtcgaagtgacgggcaggaactgcggcgtatggctgcaaatcaacatatcggtcgccaggaagaagttgatccaactggggcaggcattgatcgccacaccgagggcgtgcccctggccgttgagaaacgaataactggtagtcagcgtaaaccagggaatcgggtggaagttcaccgaggcggtcaggttgtggaacgtcttcacatcccagacacgtacgttgtaaagcagacccaggccgatcttgtgacgccaaacctcgtactcggcccccagattgatcgaggtgcgcagcatctcggtcttgcccttggaggcctgcacccggtcgaactccagctcgccgaaatcgaactccggatcgtgaacctcaccgtcgatgatctccacgccggtaaaagattgggatttggtcatctgcccacgctccaggtatttctttccccacgaaatgaaacccaggtcgttcacggcgaaagagagctgcaaatcgggaatcacgtcgtacgtcacacccagatcgacggcaaaaccgtagcccgcaggtcctttgtaggaagaaacgtcgaaatcgtcgaacgaataatattccgacccgtcgggacgctgcatggagctcatctcaaggcccgacatttcgaacgaaccgtccgcgtcgatattccaactattctcctgcaattttatatcgagccggtcgatcgacgtccgcgcacgggccgcgccgacgaggaacttaccccgtgcaccgaggtaaatctgatccgtcagcggaaaagagtaactgaaagcggcctcgagataagcctgcgtcgaggctttgatgtcgttgataacagcctcgttccgtccgttcttgagaaagtcgaacaacgaatagggcatattggcctccgcttccatacgcacattcaggtcgaacgaccagaatgtcttatgatccttgcggaatgcaccgaaaccgacgatattgatcctggtatccactccgagcatattcttcgagcgcagatttcccaacgcctcggctgcggaaacattcttgtcgaacagcgttaccaaacttccgttcaccggataaaaaatatcgctgacggagaggttgccggaggcattgacctgtaccccacccaatacgggaatattcacatagccgcgcagcggagcgaaagccgggttaagctggctgcggaaagtcgaaccttccataaagtaggcactcggcgtctgtgccacggccgtacatgcgacaaacgccgcaatcaaagtatatatgatctttttcatataaggaatccggattaaaggttcaggttaagaccgccgcgtttcttcaaatgcagcgtcatacggatcgactggctgtcgctgaatccgatgcgcggataatacttctgcggcataaaatcgacattcagttcgaagaaagagaacaagctccggatatcattctcgtaaagccgtacggaagcgatgtcattctcttcgtcgggttcgaccaggaaaggcgcgatagccacgttcgtttcggaaaaatccgctgctacttcgaagctcaccggcagactgctccacacctcgccgtacaaatcgagcgtattgaccggattgacggtaccctcgggatcgaggttttcggcaagcatatcgatcaaatcgtcgccgacatccaacgtcgcattataagtaatcgtattgattttaatctgggaaagaaattcccgcgccagctcgcccatcgtattgcgcaacgcttcgccggcctcgttgtcctcgccgaaaaactccttgaattccgccttgaaaagctcctcgctatcggccggaatcaacgccgtaaaacgctcgcggtaaacttcattggaccaaatcagatcgaccacttcgtccatttttttcgatccgggaacgagcatctcgtcgataagagcctccagcattccgtccagataagttccatcgctcgaaagacggacgatatcgacccactccgcattgcccgggagcgtcgtcggcaaccagatatcgacctcgtcgaaaatagcgcggatatccgcactgccgtcctgcagctcgtccatcccgaccgtgatctgcgccaacggcatagtccattcgctttggtcgttgccgatggttacatcgccggactcgatcttgttcagatcatacgccttgtcgcaaccgatgcaaaacgaaagaatacataacagggataaaaaattcttcataggcaaattttgcttaataaaacggcccaaaggtataatgttttcgacaaataatcaaaatataaatacttttcaaccactaacaatctgttcaatcgacggcttctgccgaaaaactccggctcattctccgattcagcgtacggcagagggtctttgttaaaattttgctacttttgtgacagatggacaatgtgaaaaaatacgggttgaaagaacaggtagccctgttgcctctgtcaccgggcgtatatcagtttctggacaagaacggggcgatcatctacgtcggcaaagccaaaagcctgcgcaagcgggtcagctcgtatttcatgcagaacaaggagcacagcgccaaggtacaggtactcgtgaagcagatcgccgcgatccggcacatcgtcgtcgataccgaaacggacgccctgctgctcgaaaactcgctgatcaaaaccctccagccgcgctacaacatcctgctcaaggacgacaagacctatccctggatcgtcgtgcgccgcgaaccgttcccgcgcgtacagtccacccgcatcctcaaccgcgacggatcccaatatttcggtccctacggctcggtgatgatgcagcgcagtatcctggagtttatccgcgaggtgattcccctgcgcacctgctcgctcaacctttcgccggcggctatcgccaaaggacgctattcggtctgcctgcaataccacctgggcaactgcaagggaccttgcgtgggagcgcaaagcgaagaagaatacgacgcactggtcgatatgacggtttcgattctcaaaggcgacctacgccccgtgcgtacctatcttgaaaaagagatggaggcagccgcccgaaacctgaaattcgaagtcgcacaacgctacaagacacgcctcgacgccctggacaactattcgagcaaatcggtgatcgtcagtgcacgcatcgtggacgtggacgtcttctccctgctggtggacgacgacgtggcctactgcaatttcctgcgcatccgccacggttcggtcgtgggcgtctatacgatacggctcaccacgggcatcgacaccgacccggctcaaatgctgaccctggccatccagcacatcgccgaaacgatcgccgggacgctggccaaagaggtcatcgttccctacctcccctcggccgcgcaacttttcgacggagtgaccttcaccgttcccaagcggggcgaaaaactcgatctgctggagttctcgctcaagagtgcccgtatctaccgcgccgaacagctcaagaacctcgagatcaagaatcccgaacggcataccgaacggctgatggctgccatgcaaaaggagctgcacttggaccatccgccccgccacatcgaatgtttcgacaactccaacctgcaggggaccaacccggtagcttcatgcgtggtattccgggacggcaagccttcacgcaaggagtaccgccatttcaacatcaaaaccgtcatcggtgcagacgacttcgcctcgatgcgcgagatcgtcttccgccgttacagccgcctgatcgccgaaggagccgaactgcccgacctgattatcgtggacggcggcaaaggacagctctccagcgcctatgccgtgctgtgcgaactgggaatcgaaaaacaagtccccatcgtaggcctggccaagcggatcgaagagatcttcttccccggggacccgatgccctactacttgagccgtacgggtgaaccgctcaaagtggtgtgtcacatccgcgacgaagcccatcgcttcggcatcaccttccatcggcaaaagcgaagcaaagctttcattcacagtgaactggaaaatatcgaaggagtcggcccgaagaccatagagctcctgttgcgccatttccgtacggtggagaaaatccgcacggcccccgccgaagaactctcggccctcgtcggaccggccaaggccgccaggctcctcgtccacttcggcagacagtaaggacgcagaaaaatgcgaaaaaaatttggagttcctcgataaatcattacttttgcagagcaaatcaccgatttagcagcccggatggcggaattggtagacgcgttggtctcaaacaccaatgacagcaatgttgtgccggttcgatcccggctccgggtactatggaacggaattcggttttcgaccgaaaattttccgacagcctactgcgataaagtatcctgcgggatactttatttgtttttaaccggaccgtgcgacgggaacaatagccgcacgcctcaaaaacaactgaattatataaaacataattaccctacccgctatggacgacggttattattattgcctgtattcagacccttaatttctaacttatattaaagaatgaaaaatgtcaagtttttcagaggcgaagatctgcctttggaattgcacaaagtgcgcgtagtacaaaaattgcatctcgttcctatcgaacgtcgtctcgatgccctgaaagagggcggcttcaacaccttccgtttacagacgaccgatgttttcctcgacatgttaaccgacagcggtaccaatgccatgagcgacaaccagctcgcggcgatgctccgcgccgacgacgcctatgcgggttcgcagtctttcgtgcgtttgcagaaagctgtggaagacgtactgggtaagaaatacctgttgcctgtccaccaaggacgcgctgcggagaacatcattgcgcgtactttcatcaagcccggtcagacggtacccatgaactaccacttcaccacgactctggctcacatccaggagaacggcggtaaaatcgtggagctgatctccgacgcaggtctcgaactgcactccgacaaccccttcaagggcaatatggacattgaaaaacttgaaaaattcatcaccgaaacaggcgtggagaacattccgttcatccgcatggaagcctcgaccaacctgatcggcggccagcccttctcgatgtccaacctgatggacgtgcgccgcatcgcggacaaatacaacctgatgctggtactcgacgccagtctgttgggtgaaaacgcttacctgatccagcaacgcgaagagcactggaaagagaattcgatggccgacatcatcaaggcaatgaccggactggccgatctggtttacttctcggcccgcaaactcagctcctcgcgcggcggcggcatctgcaccaaccgcagggaactttacaataaaatggaagctatgattcctctgttcgaaggcttccttacctacggcggtatttcggttcgtgaaatcgaagcgatggccgtaggcctctacgaaacacaggacgaaaccgtcatctgccagagtatcgacaccatccgctacctggtgaacacgctcgatccgaaaggcattcccgtcgtgactccggccggcgtcctgggcggacacctggacgccatgaaattctgcgagcatatcccgcaggaggagtaccccgccggagcactggccgcagccctctacctctgctcgggcgtacgcggtatggagcgcggtacggtatcgagcgtccgcgacgagaacggcaaagagatcctggccgacgtcgagctggtacgcctcgcctgcccgcgccgcgtattcacgctttcccagatcaaatacgtcatcgaccgtctggagtggctctacgagaaccgtcacctgatcggcggtctgcgcttcacctacgagccgcccgtgctccggttcttcatgggcggtctggagccgactaccgattggccggcacgcctgatggagaaattccgcaaggatttcggggacagcttgtaggaaaagcctcctccccacacctactaaataagcaagtgtttgcagcacggtatccgaatccgctgcaaacacttttcttatacctccggcagatcacttcgcccgcaccgcctgcgcacgccgttccagaatggccggcgtgttcttcaacgcccactccaccagattgttcagatacggcatcagatcgcccccggaatcggtcaaacgatactcgacgcggggcggcacttcgggatagacctctctatggaccagcccgtccgcttcgagcgaacgcagggtgacagtcagcatccgctgcgaaatatccccgagcgaacgttgaatgtcgttgaaacgcatcgtcccgttcgaatacaacgtcgtcagcaccagcagcgaccacttgtcaccgaggcggctcaagatatcccgaatcgggcaaattccctcgtgtaaaaaagttttcattttttttgcggttttatctctttgtcgttcaacatcggttacctttttgtaactcgcttaccaaaaaatcacctcttgcagaacccgattacttattttatgtttgcactacaaaagtaactaacatatcattaataaccataaaactcaaaaattatggcaaagaaagtagctgtattggtcgtaaaccctgtcaacggatcgggcttgtttcagtatttggaaaccttcttcgagaacggcattcccttcaggacattcgcggtagcggataccacgaatgtaaaaaccaactcggggcttcgcctccagacggacgatgtaatcacctcactcaaaggccatgaacacgaatacgacgccctcgtattcgcctgcggcgacgccatgcccaaattcgcggaaaacgcagacaaaccctacaacgtggatatgttgagcgtcatcaaaaattttgcggcccagggaaaaacgatcgcagggcattgcgccgcagcactgctcttcgacaacctcggcatcgcacagggcagacgggtggccctgcatccgttcctcaaaccggtcgtcaaaagctgtatcggaacggacgaaaaagccgtcatcgacggcatcttctacacggcacagaacgagaatacgatttcctgcctgctgcccgaactgttgaaagtcctgaaataatccccgaatcgtaaacatcgaacgaagtcccggcttttcataggccggggctttgcaatttatccgaagcttccgcctccgcttatcggaaatccgactgtaccgcgatacacagtccgaaaacggcccgtttccacacagcttccacacatttggggcacgattccacagtcatcgaccgcacgaatatcgcaacaacaaattatcaatcaacattttgaatacaatggcacacgattggatatttctaattgcaaaaaccaaattccaataccaatgaagacattcagacttattctggctttcgcagccgtagcgctgaccgcagtgtcatgcgtcgaaaaatcaggaaaataccagaccctgctcgcccaacgggactcgctgctcaccgtcgagcaaaagtacgatcaaacgctggaaatcctcaatgagatcgaaaccggatttcagtcgatccgcgaagtcgaagaccgcgtgatgactcaaataagcgacatcgaaaacaagccgctggacaaaaaacaacagatggtatcgcagatcaaccaaatcaagggtatcctgctccaaaacaaggagcgaatcgccgaactcgaagcacaattcgcacaaagcggccgcaagaacgcttcgctggccgggacgatcaaacgtctgcaggaagaaatgacccggaaagtcgcacagatcgaatcgcttcagaccgagctgtcccaaaaaaacatcgagatcgaggagctcgccggtacggtcgaggagctcaacaaggacatcgccggattgaacgaagtcactgccagccaaaaaactacgatcgaggaacaggatagtcagctcaatgtcgtctggttctgcatcgccgatatgaagcagctcaaggaggctcgcatcgtcgaaggcaacggactcttcaaaaccaagagcatcatggatggcgacttcgacaaatcggcattcacatcggccgacctgcggaatctgacccgaatcgaaacgggcagcaaaaagcccaagctgctcacctcgcaccccaaagagagttacacgctcacaccgggcgaagacaaactggtaacgctcgaaatcaccgatcccgcaaaattctggagcatatcgaaatacctggtcattcggaaataaaccgattccgacagaccgaatacccctgcccgaactgcaggggtatttttcatccgggaaagtatatcggaccataaccgtcggcccagataagaaaactcggcaaagctcaaacgacgctcgaaacgggagcagtgaacgcttgcgtacactgccccgcaaggaggaggaaaaggaacttaaataaatttggggctgcgctcggctttcactatctttgacatagtcttaaataggatgcgcctcggaaaattgggaacaagttcccgttttctctcggctttcactatctttgccctatgatccgattatcgctcatcatcgccacttacaaccgctccgcagcgctcgtcgaagcgctccggtcggtcgtgcggcaggatttcccggccgcagagtgggagtgtatcgtcgtgaacaacaattcgcaggatgacacgctggcccggttcgaagcgttcgcaacagaacatcccgcaatcaaccttcggatcgtaaccgaaacccggcaggggctctcccatgcccgcaaccggggtatcgacgaaagccggggcgaatacatcgccatcatcgacgacgacgaacgcatcaacgaacagttcatctcttcgtacgtcgccctcttcgacgcctaccccgacgctgcatcggccggaggccctatcatacccgaatatcctgcgggacgcccggcctggatgtcgagttataccgaacgtccgatagccaatccgatcgacctggggcgaaagatccgcccttttccgaaaggacgtattcccggcggcggcaacatggccctgcggcgttcgacggtccaacgatacggcgccttcgacccttcgctggggcgaaccggagagcaactgatcggaggcgaagagagcgatctttttcagcggttggcagatgccggagaacgttgttactatgttccgacagcaattatgtggcatatcattccgccgcgaaagatttcccgggaatacttcgaatcattatgttaccaggtcggacgcacccaacgcctgcgggccggaatgagggggcaaaccgtgcgtctgttatcgggcgaagccgtcaagtggggtgcgacactcctgttggctctcggcttcctattgcggttctccgtccccaaagcccgctatctgctcctgatgcggaggcaaatcacacggggaatatcgggtcgaaaaccgtaagacgcagacttggggctctgccagtgaaaataccggttgcatcgctgcaaaccggtatcagaaaattttgctgtacaaatatgttctccggatgcgggacttgccgcacagagccgtacatacgtatccgctattccagtgaaacaggcggcgaaaccccagaccatagttcggacgagtatccggcggaggaacatctttatttatgtttcccatgcgacggaggcgtgccgggcttatgccccggtcggggatgtttatggggcttcggagcttttttgtgaggcggatgcggccgttcatgaaaatggtgcaccgaaggcgaattcgggtgacgagggcaacgggaggcacacgaggtgacgagcatcgccgataaaacagcgaccagagtccaagccaacattcgttttgctttcataattctactctcttaaaagtggcacaaacaactaccgtaatgcaataacaaaaacagtcggcacgccgataagagtttccctttagaacaggtatttctccgaccgtactttctcgaccagctggaaagcgtgctgccacgcctcctcgctgaaagtcgttccgaccacttcgatcaccttcccggcgacgatggcaccgatcgtaccgcactgacgcagcgtcagcccctcgcataacccggagaggaatccggcggcatacagatcgcccgcacccgtcgtatcgacccgcttggctgcagccatgatccccacgtggaccacttcgctgccccgcttgatcaaagcccccttgataccgaccttcacgacggccagttcgcacagctccgaaagcatctgcaaggcattgagcggctcgccctcgccggtgaaggctttcgcttcgtcctcgttggcaaaaacgatatcgacgtaatcctgaatgagcgagcgcagaaattccaggttggcctccacgacattgaaactcgccaggtcgatcgccaccttcagaccgcaggctttagccgtacggaccgcaccggcaatcaactcgtgatcctgcaccagataaccttcgatataaagacagtcgtaaccttcgaaaatagcggacgtaacctctgccgcactcaactccagcgcagcccccaggaacgtcaccatcgtccgttccccatcgggagaaataagcgacacacaccttcccgagcgctccttcccccggaaaataaagggttctatacccaggttctcaagagcctgaataaagaaatctcccgtcttgtcggttcccaccttgccgataaagcccacgtcgcaacccaaccgggccatcgcccggatcgtattcccggccgatccgccgagcgagagcgagtaaggcagaccggcgaccgatttcgaaatctcggtctgcaaggccgcatccaccaggctcatcgaacctttcggcaaattgaacgtatcgagtactttgtcggtcttcagattgaccaacatgtctgtcagagcgtttcctattcctattacgcgtttcatgaagtcagtattgttcgaaaataatgtcagatagagaggatgcgcaccagatccaccgctccacggtcgatagtccggtcgtggctgacggcacgcgagaaggggacatagacgatctgcccgttgctcagaccgatcatcacgttgcgctgcccctccatgagcgcttcgatggaggcttcgcccatacgcgaagccatgatacggtcgattgccgacggcgacccgccccgctggatatgtcccagaatggttacccgggcatcgtactgcggaaactcctgcttcacgcgttcggcaagccccatggcaccgcccgtagcgggattctcggccaccagcacgatcgccgaatttttacttttgcggaatccctggttgatgagctcgcccagttgatcgacctccgtgtccatctcgggaatgatcgcggcttcggctcccgaagcgatcgccccgttcaacgccagatagccggccgtatgtcccataacctcgacgaagaagaggcgttcatggctggaagccgtgtcacgcagtttgtccaccgcctcgacaatcgtattgagcgccgtatcgtagccgatcgtagcgtccgtaccgcccagatcgttgtcgatcgtacccggcaggccgacgatcggcacatcgaactcctgggcgaaaatacaggcgcccttcaacgaaccgtccccgccgatcaccaccaacgcatcgataccgctgcgcttcatattctcataagcccggcggcgcccttcaggggtcataaactcctggctgcgggccgtcttcagcatcgtgccgccctgctggatgatattgctcacggaatccgattgcaggtcgatgatttcgtcatcgaccaatcccttataaccgcgcataataccttttacggaatacccgttatagatcgccgtacgcgtcacggcacggatcgcggcattcatcccgggagcatcgccccccgaagtcagcactccgatacacttaattgcagccatactttttctttttactgaaaaaacgttcaaatatacgaataagtcgagaacaaaagcgaattttattcggttttgtcgagcgggagtatattcggggtaagccaaatatacgaataagtcgagtgccgagcaaaatttattttagctcggccgagcgcgagtatattggacgaagtcaaatatacgaaaaacaaccgtcctccgcaactttactccgagggaaacgaccgtcgcacgcggcagtcccgctccgccggagccgggaaattccgaacgtccgcaccttccgccacacaacttccgtgcaatatgccttgcggcgtgccccttcggtccgccacaaaaaccgaagccggacttttcccacaggaaaaagatccggctccgacctgaaaaaactttttatttcgatcaacgcttttattcgaaatcaatcaaaatcatcgcattcggccgcaggctccgtcgcagtaatcttcacacctttcgagccgacatgaatatcgaccttctcaccgtcctccttatcctccaccgcgattttcacccggccttccccggcactcaaatcaaccatgccttcgggcgtatccactcttaacaaagagttatcggcagatccggggtccggcaaagccggtaattccatatccggatcataactctcctttcttatctcgtaccattcgtagcccctcgcactctcccgaacagccgaaacacccaaaccgacgataatcagcacccaaatcagaaaagtcgtcagcacggccttgcgaccgggtttacgggaagctatcagacacatcagcacataaatcaacaacagtgtcggcaccagcgcagccatgattccgaacgaagccgtccagatacccacatcgagatgcatgaactccgcaccagccattccgacggcaaacagaccgataattagcacacaagcccccataatcaagccgaacaccagtaatccggccaggattttgagcacgatcagcacgacctgccccaaagcatagacagccttggcaaccaccggcttggcatcggcatcgacatcgtggttcgctgccgaagcctcctcgatggactgcacggtaatccgctgtccgttttgttcgagcttctgacgcgcagtacgggctgccggtacagcgaaccacataatcaggtagcaaataaagaacacgccgagcaagttgctcatcagcggcacaagccaccagaaaaacggaatccatcccaacaacagcaacagaatgagcggcaggaacatcagcagacggatccacgtgggactggtcccgaaatacttggccacacccgaacagacaccgcccaagcgcgcctggtccatatcccggtacaggcgacgcggaatccggccttcgccgcgcggggcttcgcggccctcctgatcccgaatggcttcggcagatcccatttgggcgatgatttcctcgaccaacgagagttcgaccactttggagttatcctggtgcgaaaggatcagctcggcgatacgtgcttcgatatcctcgacgatctcctttccgccgtcggtatttctatacgtatcgttcaaactctccaggtaacgcgaaagtacctggaaggcatcggcctccatcgtgaaggcgatccccgaaatactgcatttcttaacctctttcatcgcaatcggtctatttgagttcgttattcgccaccccgcgagtagaacctccgctcgtattggcagagcttacactgcacggtccggcataggaaacgcttccggcgctcgacgttcgggattgcaaagcctgctcgcaatagacccgaatatcggcggcactcgacgcctttgcctcgcagaaatgcacgatcaacttccgggcatcgatcgacgcagcggaagaggcttcgaaagccgctttttgcaccgctccctgcaatacgatcgacgatgcgctcgaggcgtccgcctccagacgatctgcatcgatctgcgccacgactttggcactgctcgaagcgtcgatttcacatgcttcgacctgtgcatccacacggatcttggccgcactcgaagcttcgatatccagcatccgacctgtcaactgcaccttggacacaatcttcgccgcagaagaagcctccagcttccgaatattgccgttatggggcacacgcaccaggatttgctccgaaggaaccgcatgaattcgaggcgcgaccgtaaccttcaattcgccatcatcgactcctacccgcacatactcgatcagattgtcgtccgcacatatctccacttcaccgggctcgtcggagataacgaccttcactccacgtgaagcatcgaccgtatgaaagttcccgaccgctacggtgcgggttatcagatttccgcttcccttgatccgggtttgaccgaagatactgtctccgcacgctgtcgtaccgaacagaacggccatcattgccaacagggccatcatcaattttttcatcgttttcagttttttaattaatcaatcggttatgccgggtcgttttcccggtggcgaatcatttgaatttgtcctaccagttcctcccacgcttcatccagcgaagccaggtactcccgccccttgttcgtaagggaatagtacttgcggggcggtccctgcggggactcttcccaccggtaagtgagcaggcccgcattcttctgccgcgtcaggatcggatacagcgtcccttcgaccacgatcatctccgcctccttgagttcggcgatgatcttcggagcataagaatccccctgcgagaggatcgccaggatgcagtaatccagaatacccttgcgcatctgcgcctttacgttatcctcaaccatatcatcgttgtttatacattgaatttcttatttcatgtttcagctccgggtccggtccgcatatcggaaatacgcaaccctttccccgggcagtttccgggctgtcccggattcggcctaccgggaattcccttcgagccgtttgggacctttgggtacgacgatccacaacaggatataaacccaaatcgacaaaccgccgaccagtaccaggagcagcgtcgccagccgcacctttcccgacgggagtcccaaataatcggctactccggcgcacacgccggcaatgactacatcgtccgacgaacggtacaatctcgcatgatttctttccgctttcataggtttctatttttagaagctgttcgaattttattcgagattatttgagaactgttttcgagcagattctttttgggaggttgccgtaaatagcgggctattttcaaaacctgcaaaaaagaagataccgaaaagaggctcaaagaagccgaaacactttctcacagcgaatgttcaactcatttataaaattcaaaacagattcttagatttcgaagagatacaattcaaaggttccgacggaatcacgatccacaggatgatgtaaacccacagcgacagaccgccgaaaagaatcaggaacagcgtgataaggcgcaggatcgtcgagtcgatcccgaagaactcagcgattccgccgcacacgcctgcgatcgaacgattcgtccgcgaacggtacaagtgccgggaattgacgcacgaggcactctccgcatccacggacgcctcgtcccgcttctccccggtcggcagctcgccgaactccgatggatcgcccatttgagccattgctccctgcaccatctgaagggtaacgaccatcatcggcgatgaaatcctggaccggaaaatctcggccagacgggcctccacgtcgttgagaatttccggatcaccggccggcaaccgccgacggatcgcatccaggtactccttcaaccgacggtaagcatccttgtcgaaagtaaatgcctgggaagccaaatttacgctaatagtctctttcatggtcaatatctatcattaataaatgagttgtatattctttacagttctatcacaccacaaatataatgtaaaagtaattaccatgcaatacatagtactattttttcaacaaaaaatttcgtttaccaataatttcacctctataaatataaaaaaagcgccagaggtaaaccggacgctttaacataagatagaaagactaaatatataatatttccacgaaactaataaatgcctctttcctttaatatcatcccccaaccacttccatccttatatttaaataatataatttgggtaagagcattccctttaccaacttctattgtaccatcagaaaacacataaagataagacttagaaaatcgcttcctataaatctttttacccgtattattatccacaacaactactttgactccattggtaaaataatcaccaagttctgctgccttaaatttaacaatcacatctaaataattgttctgttctattgccgccaatgaaacatttcgatataaagtaattccccctattggcttaacactctcgccttcactttgcgcaaaagtggaaacggttgaaaaaataaacaagaatacaacgaatacttttttcatgatatcaaaaaacaattagataaagaacaaaacacaatcattagacctcatttccattaaaaatcatcaatataaaaaaagtggacaattcgagagaattgtccactttagtagcgggaggaggactcgaacctccgaccttcgggttatgagcccgacgagctgccaactgctccatcccgcgatatatcgtttattcgatgcgaatattccgcttttgtgactgcaaagataaaacaaaaaaatggttctgccaaatatttcgacgataaacccaaaaacaaataccgattaagcaggccttcaagccgatgaatcactcctcgcgcttgcagccggcaccaatcaattcctcctgaaagctcgcatactcctccggagttacgaatttgtcggcactgatcgtcaattgtccgaccggagtatcgatccgaatccgaacatcatcgctcgtaacgatcttcaggttctttatctcgacattcaaccgtcgggtctctcgaccacggaccacggagaggtgcaatactccctcctcgatctcgatcgctccattctgaatagaccatcgatcctgatcgcgcatcttccgaaacacaggatagaccagtaccgcaacagacaacaaaagaaaatagccgaatatcagtttccaatggagcgaggtaaatggcaattgctccgcaaaaaagattttcaacagcaaaaagaacagaagcattgcgactcccattcccaaaagaagccgacgaaaacgcgtccgtctcgtatcgtcataaccgtatttactcatggctcgatttgttaaatgccggatagaaactatccgacttcatcctctacgaaccaaatatacgaaaaattagcgaatatacttccccgaccccagaaaaattccgcaatacggctctacaacgatgttctgccacaacagcgccctctcatagaaaccctacttcatacgcctctcaccgctccatacggacataccatcggaagcggacgaacgtcagacgcccttgtcgggcacagccgccactgtcttcgacactaaagcagccgccacgacctcagctagatccagcacctcccggccgtcagctccgcgtgcgatagcttttttacaaagtggacaagccgttacgatcgtccccgctcccgtagcgctcagctccttcgccacggaacgcgccaagcgaagctgctgcgcgtccgaaatcgccgtattggccaccgaagagccgcagcagagggcgtgttcccgcgtctgggccggttcgagcagcacgcccaccgcttcgatcacctcgcgcggctggtcgtaaatacggctcccgcgtcccagttcgcaggggtcgtggtaagtgaatgtctgcgcccctcggcgaagctgcaggcggccgtcccggatcaatcgcagcatatactcggaatggtgcagcacttcgattccttcgagatgatactcctcccggaataccttcaggcagatcgggcacgaagtgacgagcgtcgtaatccggtgcttgcggaaaagcgcaatgttgtaatccatcatcttgcgggccgaatcggtttcaccggagagcttcagaggccggccgcagcaaacgccgccctccttgtccgcccaccagacctcttcgcccgaagccttgaaaatccgctccatcgccaacaggatacggggcgtcagcagggtcatacacccggcgaaataacccacgcggccctcgccggccgaacggtccaccccctgaaaatactcgtagcgcttctcatcgggcgtattgcgcatcgtgtcgcgggaattcagacgcagcgtattgagttcgatccccaccggacagcgctgttcgcaacggccgcacatcaggcagttgttcgccaccgactgacgcaggtggttataccgccggtcacgcaggaaatagaccgactgcacgtcgtcgatccccaattcgctctgcaactgacaagggtcgatgcagatgccgcaacgcgagcaggcatcggtctggaaacgatcgaacgatccctccttctcggtcgaatgcagcttgtagcggcgcagaaaaatcaggggaatttcggtgaagatatgcatataacgcgagaaaggcagcgctacgaagaacagccccagacagatcgaataggcccaccacaacggctcgtacagcgtctgcaggacgatcggattgacatgatgcgccatccactcgccgatcgtacccgtgagaaatcccccgccgccgtgcagagcgcaggtgatgctttcggccagcaggcgggccgggaagatcagccacagcaccgacagggcgattcggtcgcccagtacgtgcctggtcgtgcggcgcatgcccatcgcctgcgaatagatacgcttgccgaaagccaacgtcacgcccgaaagcacgaacagcagcagcagatccatcaggaaatcgaagaccggcttgtgcggcagttccgtggcgaaatatttgaaaaagacatgcccatgcaacggaacgtaccggaaccccaggtaggcgaccgtttcgatccatccgacaacgatcagcaggaaccatccgaaggccaggctcatgtgcatatagcccagcaagggattgaccttgaagatgcggcggtgcagcagcgattcgcgcaccacttcccagaccgccaatggcgtctgccgcgaaggaatgcccttgacgatccgcatgcggtcggcagccgaaagaccgaagatccaggaaccgtatttgacgatcagaacgacgaacatcgtcacgacgcccacgatgaacggaatagagaatgtcgcgtaaaaattcatcgtcagaaatcccccagtttacgtttgatgagcatcaccacagcccgcgtattgattccacgaggacacaccaggcggcatttgccgcacaacatgcatttgttcatctgttcatagacgccctgatattcgccccggcgcacgagcgtatggagtttgcggaaattgaaatccgtaaggttgccggccgtacaggtcgccgtacagccgccgcagccgatgcaggtctgcaattcgggcatctcgcgcaggatctcgtcgctcttgcgcaggttgttgctgtcgatgtcgatcacgcgcggcttgttgatcgcatatccccagttgatcgctgccatgactataccctccccagataagccgtcagggcttccgccgccgcatcggcctcgttcaatgtttctccgatattcttcggcgcggtgaccgtaccggcgtaaaagatcccgtccacaccgctgcgggcgctgttcaagaagaggtcctgcggttccatgaagccgctgggcgcctgcctcaacccggccgaagccgcgaaatcggcgttcgaatcgttcgcccgcatcccgacgagcagcaccagcatatcgacgctcatccgcaaaggacgccccgtcagggtatcttcggccttgatctgcaaccggccatcgtaggtcggactcgcttccgaaatacgtccgcgcacgaaatgaatattataattctgttgagcctcgcggtacatctcttcgtaaccgggcccgaacatacgaatatccatatagaaattaaagacgtcggcatccggaaacagccgcttgagttccatggcctgtttgacgcccgtgatgcagcaaacacgcgaacagtgcgcctggcacaccttctcgtcgcgcgatcccacgcagtgcagcagggcgatccgacgcggacggcgaccgctggaggtagtcacattcccttcgttgagcatccgctcgatgtcggccgaagtgaaaacattgtcataaaccccgtagccgtattcctccttgagccgggcatcgaaaagcgtgaagccggagcaaacgaccaccgagccgcactccaggatgcggccgtcggccaacgtcacgctgccgggggtgatcgacaccgcttcggcggaagtcatcacttcgacatcgcgtgccgccagtcggcggcgcaactcggaaagcacctcggacgcaggcgtcagcaacgggaacagatgataccatccccggagcttgccgcccagatcgggctctttctcgacgatcgtcggacggatgccgcgatccgcaagccgcagtgcggtctgaataccggcgacaccgccgcctacgatgataacctctcttttcattgtgccttgatattatagatcatatcctgaacgccgcaattgacggccgaaggtgccggtttcccgatgaatttcccgtgacgccccaggtatttggccgcaggatcgtagtcgatgcccattttttcgagcagcggctccacatccacctgatgcatctgcatacccagttcccagggatcgtaccccagcaccagaccggccatctcctcgtacgtcagcaccggaatacctcgtccgtcctgaccgtaggtgacgccctccatctcggcgatcgtatattgccatttgtcgaggaacatggcgcagcccgggcagttggccacgatgaaatcgggcttgtagggagccatgctctcgagtttcttgtgcgaattggcgaccgaatagccccggttggcctgcaccaggtagttgcggaatccgaagccgcagcaatggcgccgctcgggataatcgacgcactggccgccccacgcatcgatcataccggcgagcacataaggaaattccgaaccgccgatacccgccttggggaaaatcttggcgtagtggcagccgatatgttcgaccacccgcagcggctctccggtggcagcattgaccagccggtatttcgccttgcgggcgatctcctcgcgcaagtggaaaacgatgtccgaagtgtgggccaggcttttcggcttgcggaactcgcggccggtagccttataaaggtattcgcgcgtctgttcctccttctcgggaaactcctcccaggtagccagtatctcggtatagatgccgaacgaagtgatgcacgaagagatgaaattctcataccccgcatcggtcatcagcgcgaactgccgggccacgaccgtcatgatcgtatccagcggcacgatgtccgaatggtagccgatgcccgtacacgaggtgtgcagcggatcgtcgaagacatcgcgtcccagatccttctgcaacatgttcaaaaacgccttctcgctgcccggaaaaaagttctgacggatgcagctgcgcacatagtaatatttgtcgtcggcgatctccttctggtaatcgctccagctcgaccgtttcatacgctaataatgttcgttggaatttttggtgtaggtatccatcatgtactcgtcgtccgcaccgtcgtatcccatctcgcgggccttgcggtcggaatgcttctcgatcgtgtcgaaaaactccttgccgcccgtgacgtcgaatatccggtggagttcctccatggaccggtcgtccagcttgcgcagcgccccggcaccgggacggttgtaagcggcggaaaactgtccgtaaatctcctcgtcgttctcgtagatccactcccaaaccgtgccctgttcgggatgcagctcgggcttcaccagtttcggggtcacacagtaacccgtacggaggatattctccccgatcgtgcgcttgagggccagttgctgccgccccttctcgctctcgacgaagaaaccgagcttttgggaaagcgtccgcagcgcctggatgacataagcgggagtattgcctcggggacagcggggccggcacgacatacactcgccgcaataccagatcacgtcgctgcgcataagctcctcgatcgcatcgtcgtcctgcgtctgcacgatattgacgatctgacggggatcgtaattgtaaaactccgccgccgggcagacacccgtacacaccccgcaattcatgcacgaatgaagcccctccctcatccgcacatcttccatcagcatatcgaaatacttacccatacaaaaaagataacttcgcagcagcaaagttatccattccccaggtaccgtacagtagtagaaatacctattttcgccgtctgtaatgttcgaacgcaaaggggtaaggaaactccttccccgaagcaaacgactcgctgtcaataatttcccattcccgttcatcccacctcggaaaacaggtatcgccctggtaggcatggaacacccgcgtcaggtagaactcgtcgcacaggggcagcgcctgggcatagatctgcgcccctccgaggacgaagaccttctcttccgggcggaaaagcgccagcgcctcgtcgagcgaatgcaccacgtcgcacccttcgatcgaaatattctgtcgcgtgacgaccacgttgcgccgacccggcagcggacgtcccaacgactcataggttttgcggcccatcaccaccggatgtcccgtagtgacggccttgaaatgcttcaaatcttcggaaatatgccacaaaaggcgattgtcaccgccgatcactccgttttcggccactgcgacgataatggcaatcatgtctaatcaatcgttttttctttttaatatcagttcgaagccggatacggatggcaggatccgctgtttcgcatccagcaaggtcagcgtatcacccccttctttcaacaggttgatcgtttcgtccccctcttcggtcacgagctgccagacggtcgcatccgcattttcaggaattccccgtaacgtatatctgcggcctcgcctcacggacacctctctccggcgggcatcggcttccgaataaaaccgctcgagtgtgaacgtaccgtcgccgctgtgttcccggctttcgatcgtaagtctgacgcatgttattccgtcgccggaagcctccggaatagttccttcatataccagcacctgccggccgcccaatccctccgggtccatcgaggttcgaggaacttccgtttcgaccttaccgcctctgtccgcatgcgaacacgacgccgacaaaatcagcactgcggccgacagcatatacagaattacccgcatagctaaaacgacatcggagccttgatcgccggccagggatcgtaattctccaacgtgaaatcctcgtaacggaaatcgaagaccgaccgcaccgccggattcagccgcagggtcggcaacggccggggcgtgcgggacagctgctcggcaacctgatcggcatggttcagataaaggtgcgcatcgcccagcgtatggacgaaatcgcccggacgcaatccgcactcctgcgcgatcatcatcgtcagcagcgcgtacgaagcgatgttgaacggtacgcccagaaacgtatcggcgctccgctggtaaagctgacacgaaaggcgccctccggccacgtaaaactgaaacagcacatggcagggcggcagcgccatatcgtccacctcggccacgttccacgccgataccagcatccgccgcgaatcggggctgtgtttgatctggtcgatcacctgccggatctggtcgatgcaccctccgtcgggacggggccaactgcgccattgatacccgtacacatggttcaaatcgcccaagccgtaaccttcgatcgacgaaggctcttcccgccgcacggcatcgagaaaggcttcccgctccagcggcaaaaccccgtgacggacacaaagttcgttgtaatagcggtaagcgtcgttgtcccagatatggaccccgtgatccaacaggtattttatattggtatcgccctgcaaaaaccagagcagttcgtaaatcacccctttcaggaaaactttcttggtggtaagcagcggaaacccagcctccaggtcgaaacgcatctggtagccgaagatgctgcgcgtaccggttccggtacggtcgctcttcacaatgccgtcctttcggatcttacggagcaaatcgagatactgttgcatggtcgaatcaatattttttcaacgaggcgttgccctcggagtcgatgaccgcatagaccggatcggagtgccactccccaaggcacagcacccgcaaatttccttcggaatagtcgcgcggctggtgcatatggccgaagatgaaataatcggggcgttcggctccggcatattcgcgggcatattcgatgagcgggtcggtaatatggtcgcccatctcgctcaccagatggcttttgcgggacttgccgctccaccactgcccgaaacgcatcgcccagtcgggatgcacgagccatgaaaaaaggaaacggatcgttttggaacggaacacggcattcataaagcgcagcacaggaagatgatcgatcttcatattgtcgccgtgcgccaggaaaacccgtttgccggcaagctccatgatccggggcgaggtatagacctccactccgcactccgcttcgaaatagtcacgaacccacatgtcgtgattacccgtcatgaaaaccacccgaatcccccggtcggtcaattcgcacaactttcccaatacgcgcacaaaccctttggggacgacccgtttgtattcgaaccagaaatcgaaaaggtcgcccagaataaagaccgcatcggcatcgcgggaaacttcgtcgagccacgccacgaaacgtttctcgaccgcacgggccgcagccggtcctcccgcgcccaaatgaatgtccgatgcgaagtaatacatagcctattcgaattgcgcttcgagcgcccgttgcaaccccgtaccgtaaagatcgcgggccactacgataccctcacgatcgatcaaaaagttagcaggcagtttctgcacgttgtaaagccccagtgcgggagaatttcgtccccggaaatcgcaaaccgaaatccagggaagctgctgctcctgcacggcgttgatccagatatctttcgaaacatccacaccgatctggtaaatttcaaatccccggtcggcatattcggcataaacctccttcaattcggcgttgatggcgttgctgtttcccaattcggccgaccagaaatccaccagcacgacctttccctgcaacgaactcaaacgcactttacggccgaacatatcgggcaactcgacatcgggaaaattcgtttcggcgatattcgacatcagattttgccgcgcatccatgcgggcgatctcactggccagcaacggcaggtaggaagactccggataacgctcctcgatggcttccgccaccatgcggtagtaaatcacatctccgtcgaggttgaaaaggtaagtttcgcccggaagccgctggtacaaggcatataccccggccagggaagacttatgctcgacgatgaacttgatctgttcgcgtttgatccggcggtattcggcccaatattcagactcgatccgtcgaatctcctcgtcggtcatcctgtaagtttccggcgaagaactcaacgcatcgagccgctgcatcccggccacgaacggctgataaaatcggcgcagcaactccgactcctcggacccttcgaccgtatagttgtgcaccacacgtccgaccgagctgaccgtcaagcgatctccgccctgcaggaacaggggaatcttatcgccgttgcagactaggttgtaaagcgccggagtacggtccacatcgcacaattccaatttgtaattcccggtttcatccagttgcgccgaatcgatgagcgtctgcgccaacggagtaacctgctcgagatagatcatccggcaatccgaaccgactatacgacccgaaatcttaaccgtagaagagtgacaggaaaccgccaggagcgcccctgccagaaaaacgatcgaaataaaaaatctgctgcgcatgttgcgagaaaatggtttatcaaaaaacggaaccctatttcgaggtattgtgccgtgcgcccccgttcttgccgttgaaattgcgcgactgatgctgattccggttcttctgctgccgttgctgcgctcccttctgacctttctgacctttttgcggatgcgccataaagggctgtttataatcgcttcggatattattgagagccacttcgtcgatttggatcgcatttccggacattttttttatgtcttttatgataacctcgttactcggatgttcctgattgtactcgtagctcttggtgcgcatgtaacgcgccaggttatcgacggtccgcgtgactacctggggattcttctcatcggccagacgccggatcatccgttcgacatatttgccgtaatgcttgtactcgatatgtcccgacgaataaggcatacgccggggcaccgtggtaagttcctggcgcgaaggctgcggatagggggagtccacatccagttgaaagtcggacatgatgaacaggtgatcccacaacttatgggtgaagtcggccgtatcccgcagcaggggattcaggtttcccataacggcgatgaccgcacgggcctgccggttgcgctcgcggcggtcttcgatctgcatcagcgaatcgaccatttcgtgaatatggcggccgtattcgggcaaaaaaagcttccgtcttttataattataatttttttgcataatttttgcgggagttcggtggcattgttattgcgaaccgttccaataacattctgaaaagatttcgcggatataaatttcaaagcgatcgtaaattcacctttgaaatcaactttatctacaaagttggattcctgcgaataatatattaacttcgtcacaaaagtacgtaaaaaaatcacaaaagcaaggtatggcaaaagttttaatcctggatcaatcgaaaagcatacgcaacacgctgcgagaacggctggagtttgaaggaatagcggcggaaagcgctgaaaatgaagcggcggcatccgtattatgcgaacgtatccctttcgatctgatcatttcggatcatgaaacgaggcttcccgagagcgacgtacctttcatcgtactttcctctgaagcgacggtcgattcggctatcaaggcactccggaacggagcgcaggactacctcaccaaaccgatcgacataaaccgcctgatgcagtcgatccggcaaacactcgaacaggcagccgaagcgccgcgcacggcggcaaaagccaaagcgaaacgcagctcggcaggtcacacggaagagatcataggcacttccgagcaaatgcaacacgtccggcgtctgatcgacaaggtcgcaccgtgcgacgcccgcgttctgatcacgggcgagaacggcacgggcaaggaactcgtcgcccgctggctccacgccaaaagcaaccgggccggagcgccgttcgttgaggtcaactgcgcggccattccctccgaactgatcgaaagcgaactgttcggccacgagcggggagccttcacctcggccatcaaacagcgcaagggcaaattcgaacaggcgagcggcggaacgctcttcatggacgagatcggcgacatgtcgctggcggcgcaggcaaaggtgctgcgggccctgcaagagcgcaagatcagccgcgtaggcagcgacaaagacgtcgatgtcgatgtgcggatcatcgcggcgacgaacaagaacctgcgagaagagattaaaaaaggaaatttccgcgaagaccttttccatcgtatcggcgttatcctgatcaaagtaccgcccctgcgcgaacactcggaggatattcccctgctggtcgatcacttcatcgatatgatctgcgaagaatacgacatgccgcgaaaaccgatggataaaaaagcggtcgaaatgctccggcaaatgccgtggacgggcaacatccgcgaactgcgcaacgtcatcgagcggctcgtggtcctgagcggcaccaaaatcacaccgaacgacgtagaactctactgttaaacatttcagagcaactcgagaatctcaccggggcggtccactacgtggtctgccccgtgttcatacaactccgcccggtcgcggaagccccaagtcacaccgaccgaccggacaccggctgcccgggccgtatccatatcgacgcccgaatccccggcgtacagcaccgctccggattccgcatccgtatcggcgagaatctcccgcaccacctgcggatcgggtttgagcgggactccggggcgctgaccgaaaaccgcatcgaaacggatcgacgggaaatagatccgcaccaacttctcggtaccgatttgaaatttgttggaagcgacagccagccggactccacgctgcaccaactcccggagcaattccggaataccctcgtagggacgggtaaagcggtcgatatgttcggtatagtaagccacgaaatccgcacgcaccgccgccaccgtttccggcgtgcgcagctcctcgggcagcgcccgttcgaccagccgcataacgccgttgccgacaaaaccgcaatactcctcataggtatgcaggggcaatccccgcgcagccagcacatgatcgcagcaagccgccagatcgccgatcgtatcgagcaacgtcccgtccaggtcgaaaatcatcaatttcgtatccatatcaagtccttgaattacaaataaatagtccgaaaacgggcaggagccgtgttcctgccccgtaaaaacggcccctatcggccgaaacgcccaaagccgagccaaagatacgaataagccgagcgcaaaagcaaatttatttgcgttttgccgaggcgaaatatctaaaattacaaaggagccgagcacaaaggcgaattcattcgcttttaccggtccaagcgcttgaaacggccccgaaaaagggacaaaaagctgtccgaaggcaacgatgcacgcgaaacattttgttatttcgggattttgagtttactttgtcatcatcgtataaatcggacaaaacctatgaaaacagacatcgaaattgcacgcgaaacgaaattaaataaaatagaagacatagccgaaaagctgggggttccccgtgacgaagtccagaattacggccgttacatcgccaaggtgcccatccacctgatcgacaagaaagagatggacaagcacaacctgatcctggtttcggccatcaccccgaacaaggcgggcgtcggcaagactacggtatcgatcggcctgtcgcttggcctgaacaaaatcggaaagaaagcggtggtcgccctgcgcgaaccctccctgggtccctgcttcggcatgaagggcggcgcagccggcggcggctattcgcaggtgctgccgatggaaaacatcaacctgcatttcacgggcgacttccacgccgtgacatcggcccacaacatgattaccgccctgctcgacaactacatctaccagaaccggaacagttgcgaggggctgaaagaggtcaagtggaagcgggtgctcgacgtgaacgatcgcagccttcgtaacatcgtatcggggctgggaggttcggccaacggcattccgaccgaaacgggattcgacatcacggccgcctcggaaattatggcgatcctctgcctggccaccgacatcgacgatctgaagcgccgcgtcggcaatatcctgctgggctacacttatgacggcaagccgttcacggtgaacgacatgggcatcgcaggcgccatcactgtcctgctgaaggacgccctgcttcccaacctggtgcagaccaccgaaaataccccggccttcatccacggcggcccgttcgccaacatcgcccacggctgcaactccgtgctggcgacccagatggccctgacctacggcgattacgtcatcaccgaagccggcttcggcgcggatctcggtgcggaaaaattcttcaacatcaaatgccgcaaagcgggcttgtccccgaaactgaccgttatcgtagcgacagcgcaaagcctgaagctgcacggcggagtccccgaagcacaaatcaaagagcccaacaaggaggggttgatccggggattcgccaacctggacaagcatatcgaaaacatgaaaaacttcggccagcaggtgatcgtcaccttcaaccgcttcgccagcgatacggacgaagagatcgccctggtcgccgaacactgcaaggaaaagggggtcggctttgcggtgaacacggtcttcgccgacggtgggaaaggcgcagtggaactggcccggctggttgccgaaaccatcgagaaaaacccatctaaacccctgaaattcacctatgaagagagcgattcgatacggaaaaaggtgcgaaaaatcgccgaaggaatctacggagcctcctcgatcgtctatacgacgctggcggaaaagaaactcaaggagatcgaaaagctgggcatcgcccacttccccgtctgcatcgccaaaacccagtactccttctcgtccgacccgaaagcgtacggcgtagcgaaagatttcgaactgaaagtccgcgacatcatcatcaacaacggcgcggagatgatcgtagtggtcatgggcgaaatcatgcggatgccgggtcttccgaaagagccgcaggcccgccacatcgacatcgtaaacggactgatcgaaggattgagctgattctgcggggtgcgataaaagatcgaattttatcgcaccccgatttttcacggcacaagttccgcaacagtccgtcccgatttggcggattcaactattatttctatttttgagtgttttaaaatcgttgaatttctcgactattttgtgcccggcataacgaatcgactcgctctgccctgactgatcgaaaacacttcaaataatggcaaaacgcatcccgaccccggccgacatcttccgattctacgtggacggattccgctcgatgaccctcggacggacgctttgggccattatcctactgaaactcttcatcatgttcgccattctgcgacttttcttctttcccgaccaactggccggcatgagccaggaacagcgcagcgaacacgtactcgaacaattaaccattcccgacgtttccggcaagtgaggccaccgcaagcccctcccggacagcggaaacgaagactaaaactcaactaattatctcaaaagtatgttgtcggactatctacaaaccgtcgattggtcgcgggcccaattcgccatgacggcgatctaccactggctgttcgtccccctcacgctgggattaagcatcatctgcgcgatcatggaaaccatctactaccgcacgggcgatcccttctggaaacgcacggcgaaattctggatgcgcctgttcggtatcaatttcgccatcggcgtagccacgggcctcatcctcgaattcgaattcggcaccaactggtcgaactactcccacttcgtcggcgacattttcggcgcgccgctggccatcgaaggcatcctggccttcttcctcgaaagcacgttcgtagccgtcatgttcttcggctggaaccgcgtcagccgaggcttccatctctccgccacctggctcacggccgtcggcgccaatctgtcggccctctggatcctggtagcgaactcctggatgcaatatccggtaggctgcaccttcaacatcgacaccgtccgcaacgagatgacctccttctgggacgtactcctctcgcccgtagcggtcaataagttcacccatacggtcacctcgtcgttcgtgctggccgcgctgttcgtctgcgccgtctgcgcctggtacctgctccgcggccgcgaacagaagatggctcgcaagagcatcgccgtcgcttcggttttcggtctggtattcgctctgattaccgcattcacgggcgaccgctcgggagcgatcgtggcccgggtgcaaccgatgaaactcgcggctctcgaagccctttacgacggagaggagggggcagccctgaccgcagtcggcatcttgaggcccgaagccgaacgctcgaacaacgaggatgccttctatttcaagatcgctattcccaaaatgctgtcgctgatgagtttccgcgacgccgacgccttcgtaccgggcatcaacgacctggtgaacggcaaccctcaatacggcatcatgccgacgatcgaaaagatcgaacggggccgcgtagccatcgcggaactggagcgtttcaaacaggcccgcgaaacaggcgacgaagcgaccctcgacgagatacgggccaaattcgatccagacacccccgaaggagccgtcttcctgaaagagtatttcgcctatttcggctacggttacctcgactcgcccgcgcaaaccgtacccaacgtaccgctgcttttctactcgttccgcctgatggtcggcgcagggtgtcttttcatcctggtgctggctgccgcctggtggttcaaccgcagggacacgctcgaacgcaagcgctggatgctgtgggtgctgctcctctgcatgccgctcgcctacctggcttcccaggcaggctggatcgtcgccgaagtgggccgccagccctgggcgatacaggatctgatgccggtcggtgtcgccgcttcgcgcatcgccagcggctcggtcgccacgaccttcttcatcttcctggtgctcttcgccgcactgctcgtggccgaaatcagcattctctgcaaacaaatcaagatcggacctgaaaaagagtaaaaattatggatactttggcattgctgcaacactactggtggttcctgatctccctgctgggagctttgctggtcttcctgctcttcgtgcagggcggtcaaagcctgctctacaccatcggacgtacggaacacgaacgcaacctgatcgtcaattcgctgggccgcaaatgggaactcacgttcactacgctggtaactttcggcggcgcgtttttcgcctcgttcccgcttttctactcgaccagtttcggcggggcgttttacgtctggatgctgattctgctggtcttcgtcctacaagccgtttcgtacgaataccggcgaaaacccaataacgtattcggagaaaagactttcgactggttcctgaagatcaacggatttctcggaacgatcctcttgggcgccgctgtcggcacattcttcacgggtgcgaatttcaccgtcgatcggttcaacatggccaacctgggcggcgacaccacgatctcgcagtggacgactccctggcacggactcgaagcggtgctcgactaccgcaatgtggcgctgggactggccgtgctgttcctctcgcggatgctggcgctccactacttcatgaacgacatcgacgacacacagatccgcgaacgctcgcgccgccgctcgctctgcaccgcaggaacattcctcgtgtttttcctcgtattcctcgtaagcctgctcttcgcccagggttggagtgtcgatccggcgacgggaatcatcgctccggaaccgtataaatacctgcacaatttgttggccatgccctacgtcggcatagggcttctggcgggtgtggcgctggttctctggagtatctggctgggctggcgcggcagtcgcaaggcgatctggctgagcggatcgggaacggtcctcacggtgctcgccctgctgcttacggccggatggaacgatacctcctactatccttcgctggccgatatgcagtcgtcgctgacgatctacaactcgtcgtcgagcgaatttaccctcaaggccatgagtatcgtatcgctctgcattccattcgtcgtcgcctacatcggctacgcttggtgggccttgagccgcaaaccccaagacggctccaaagaagaactcaaatactaaagacacttcgacgatccctcgatcagcgggcccggaagagtgatcttccgggcccgctgcaaaatggcaaaaccgtcaattcaggtttttctcgataaactccttcaaaatcaccgcatggttctcaaccctgttcttcgaggcatagagcaacgtcacatccggataggtccgaatgcggtcgagaaaatcctgcatggcagccgaactccccagctcatcgaggtacttgcgccgaaactccgcccaacggcctgccggatccccgtgataccacacccgcagcgacgtcgaaggagcgatccgcttcgcccacaaatcgtaatgaaacgcctctttgcgaatgccccgaggccaaagtttatccaccagcacccgaaatccgtctccgggactttcagggtcgtaaacccgtttcagccgtacttccatattcttatggtttttgcaagttttttaagagtaaataggagtataaacttcatttcttttgatgacggcgaacatacgggccacgattttagcacgtaacgcattgattaccgacattttgttctttccttcttctactttccgcatatagtaggcctttagttcaccctctttacgatgagttaccgatacggctgccatatgtagcagtttctttatgttcttgttggccctatgcgagaccttgtttttggagtgctggctgctcccggatgtgtatgagaacggagcgacacctgcgtgacagcagaactttctgggattgtcgaagcgggagaacgcttctgtttcgataatcacattcagagctaccactttacctacaccgtctatcgacattaaaagttccatctggcgcgcaagcacttccgttgagcctatgatcttctccatttcagcagtgatcgcatcgatagccgcttgtagttcctgtattaagcctttcatccgctttgttttcttgcgataaagcgccgccggcataaaatctttctgatcgtacatctggcctttgtatttagccaggtcggtaacgtaaagcgcacgctccctctccaactgtttaagcctctctatctcctcggtgggacggtcgtaatacttaaccttatctccgaaccgtgaagcgtaaatggctatgcgctttgcatccaccttgtcgttcttgccccgctgcataccggatgaatatttgatctgggacgggttctccaaccaaagtttgcactcgaccgacttgcaagcacataccagagggaaagtatattgccccgtatgttcggcacagattaaaaactgttcgttatccatttccaaatcgttcttcaactcgccgatcagtctggcgacagcctgctggtgattgcttacctgttcttcgcgcagaaccttaccctcgaatagtacgcagaagtccagtttctttttgctgacgtcaaccccgatgaaataaaaattgtccattacttttgtttttgaccatcaaattgagagaaaggaacttgaacctatcctaactaccttaacaatgaaaggttaaattcttattcaggtctcggttcaagaaagacaaagagtcctaatatggaaatgaatcttgaattcttatcgatacctggttcactccctgcctccctttcttttagctaacctcttctctacaaaattaccaactctatctcatctcctgtttactgcgcaaatctaaggtactcgattcgtcttaacaatctgtactcgcttcaacaaataacgggcaaaataccccggacaacttcaaaaaaataccgatatgtataaaaaagatggattcatcacaccatccgaacacgtaaatttcctggccaaaaatctgttcggagcctgcggccagatcgtaaacggcgccatcgcctatctcgcccctgacggcggcggccccgtcacgccccacacccacgctaccgaccacctgttcatcgtcacgcagggagaagccaaagtgctgctggacggacaagagcgaatcatccgcgaaaacgaagcgttcatcgtcaaaggcggtattccccactccgtatggaacaacgcacaggcagaaaccgtcatgataggcattaccattaaagagaatgacaaagagtaataatacaatccgacaaaaccgtctcaaacggcttaccggaaatctaccttacaattttttcagagtaccgtaataatggataaatacgacctccgtcactattgcaaatcaagaaaaagctccagaagctaaacagatggcttcattctaaaataccaactttcaaacaattaacccatcaaccccataagagctatcaggccgcaaaaaatttggaataaatcatacaaaactaacagttgcggaaatcaaatcttccagtgcattgcgtacttcttcaatactatcaatagaatcttgcatctcattaagttgctcctgtaatttatacatcatatcttactgtcgctctgtcaattcataacgacattcatactcgattaatttattttctacaatagacattttcttttcaaaaatgtctatcatattctcaatctctaatttattaatttctgcactcctatgaattgcagcaagtttgtcggaatctgtcttattcattttattttgatcatctattgagccattagttttctcgcttcgttaatgtcgattcttgcgtgttgaccatgcttttctaataaccataaaagattcgcgccattcatcaagtgaatcggcttatcttttgcgaattcgtatgaatcgccgccatagtctgacgtcgtaacaagaatgcccttcgttgcaccttcattcaaaacagttccatataaatccctgaccgcagaaacaccaaccgtgtttgtgtaccgttttgcttgaattacaatttttccaccacgaatagggtccggatcaaaagcaatagcatcaacacccccatctcgactggcttgggtaacctttacctcacctccattacagctaaactccttttcaaatagctctctaatcagatgttcaaaatcctcccaatgcatagaagcaagattggtagaattgtctatttcggttcctacatcataatgttcaataaaccttttatccgatctattaagtgccacaataggctgtatggctgtaatagtataaagctgactacttgcaacaccttttagagatttgaaacaggctttcgggctaacattcataaagtcaatgtcagtaatctgttctctatttgttttaatcgacaatatacaattagtttctattttgccattagctttattaagagcactaacccacccgttaaatgcaacagaatttacaaaacttaaatatttatctgcaaaaatctcgtatatagatcgcaatgtaatctgataaagcgcatcatcatagtgcttggaaaaaactttttctgtcatttggactggaacacatttccctttggtgaatttcatttcaaccaacgatgggaatgtatcgacagaaggaaaggaataatctattaccaaaagatcttgattgcatgttagtattatatttttatcatactcaataggatatgcagaatattccaacagcaaagagcaatattcctcaatagcttcctttttcccattgattatattgtctttaaatgtctcaatcttgtactctatttcttgcttcttactcgaatattccttttcatcctcttgcaagttttttattaatcgatccttttctctctggtattctaacaactcctccgaatatttcttgaattccttttcgtatcgattctcttcttcaagattaaatttataaacatcattgcaattacactcgtaaagctggtatgcccgttcaaactccttcttctttttagaatcagctattgattttagaaaaggtaaaactttatgtattattgtatatttagccacaaaatcagattgcagaggtctagtcggattctcaagtttaacacaagcttttggcaaggatggtttctttaatttactgatcgcagattttgtgcttttaatagaaacatctagttctgctagttcttcttcggcattatttttataatgctgaaatacgtcaatattctgaaccaatccatctaaaaggatattttttatcttatagttcagctttttgatttccagtgttttattatgggcaaattcagtattcttttccttattgtccatttctttccacttctcaataagcttatctaccttttgcctgacgatggctaggtcatagtcttttataattttatgctctgcatacttgatatgcataatatcagcaacataccgcgtacgccaatctcttgtacgctcttcataataagatagaactatattactgtccataatacgattattttcactcgtgtctaatcatttgtaaatttaacaaataatttttaaaagaaatatatacacctttaaatcctttttgtgttccattgctggaaggagaggaatgaggtagaaacttcgccctccattttccccgatccggccggaggttacaaatatcccgaaacaaaaaacgtatcagccattctctatcgccgcagtccattcgaacgaccttgccgcgttgcagacacaaaaaggctgtgcttccgtacaacatttctccccgtttccactcttcggcagagcgtgctggacttcgcgttaccgcatgccgcccgtccttccctccgtcggaccggaggcgaccttgcgaactcctgattttcgcctgccagccatacgaccaacttttatcttcaaaccgctccggacaaatttgtccaccccgaaaataaaaaaggttgcaaacattcgtttgcaacccaaccgaccttccggtcgtttgcggagagagagggatttgaacaatccgcccaatcctcagtatatcaacctgttattcggaaataaaaatcaaagtacaccgaataacccacagataatctgcataattttacccttgcgtcgcacttggtcgttgcaaagatagaaaaatttcataaaaagagcaaataatcccaatcaccattctcacaagcctggaaatgcctcaagcggacattcttgtaaaacggtatttgaactattttctttgcggattaccggaatattccggcacaatctacaataaaacattgtgcagttatggagtttcaaatgatcgaacagagcgctttcgacgaaatgaaaacgctcgtaacaaccttacgggagcgtgctgagcgattccgagagctgttctcaccgccgcaaccgcgacgctggctgacagccgaagaagtctgtaaagcactgcgcatcaccaaacgggccttgcagtactatcgttcggaagggatcatacccagtacatcattgggcaacaagattctgtacaaagaatcagacatcgcgcgtattctgcaaaacaacctcatcgctccttctaagtaatggacgacgtactcttgcgaacctcgccggaatacaaggagttccggcaggaaatacttcgtgcgattcatttgctggatacatcgatcgcggcccatcgaccgacgatcgtcacggaaagctatcttaccggcgaagaggtgatggagctgttttcgttatgtccccgtaccctgcaaaactaccgtgaccgtcgggtacttccctacacgacgatcggcagcaaaatcctctacccgcgttctcagatcgaaaagattctggaccgaaactatcgtaaatcgctgcgatagtgtattgtcaaatagtacggacggcacacaatgccgtccgtactgtttttatttcatcgttgcatccattgtctcggagagtttttcgtacagggcttcggccatagcgaagcatccgtcgagtttaggcttggctccgcttttcgtgtgcgagtgacaaatactgtctcgggagagttcgattacgcttcgggacagggttccgtgtgtgcgaagcggtatgggaatccgcttgaatttgcacagcccgataaaattctcgctggagatgtattccccagcgaggaacctggtccctgccaaccgtaactgttcgcgctgctgctcttcggcttgtcgccgctgctgctctttccggcgtttccgctcctcgtcctctcgctgcaagcgcaattgacgctcttcccggtaacggatcaaaggtgccgcatcgaggcccagttcttcataaatccgcacgaggaggagttgcagatgtcgtccttcctgcatggtctgctcgatggtccggtggaagtttttcaggacttcggctccggcagcggccacgtccttatcagcgaggaatcgacggctgtaagtgccgtattcgaaaaagacgtcttccagttgcaggacgatggcaatcatatcgtcctcttcacgatattgatccttctgttgaaggtaggtgtacacgccctcgccgacttttcccagttcagcataatgccagacgacctgattgggattcgagcggctgtaacacaaaaattcgttttcatagaatcgattatataatcttgttataattgtattttgccgtttcttggatttaagcgtttcggaccaacagcccaaaagcgtcgaacagttccacgacgcataggtcagaaaccggtaccgtccgcagtctgccgtcgtcgtaatccaacagagcatagagtacatcttcgttcactcggaatccgtacacgtagcaggcgtcgtggtattcgtcgctgattaggacggagtggccttcggtttcgaaattttggtcttcgaactgaacgacgagactctgcgtattttagagattatccaactgaatactacaacttataatccctattctataaagtcttcgacgattcgtccctgcgtatataaatcgcgctctattccgaggccgcccggcaacgcgatacgttgcaggtcggagagcatcaggtaaccccattcccactcgcaaatgtggcaaaacccgaagagtttccaatctccgtcctcctgtttctccgcctccgtaatgagccacgttccggctcccatggggttgaaatactttacaagcacctcggccttcagacctttgccgtcctgcgaatagatcggatgttcttcgaatttccgaataatctgtttcgtaagcaattccataactgttttatgcagtgtttatcctcctgcgccggagttttacaggacggccgctcctactgaaggagcggccgtcaaaggttcgtattgtctgcaacttagcaggttgtttctggttgtgtgatccattcatcgtatgtcatcgcatcaatgagttcgtcgtcaccgtccatatcgatttcgatataaccttcaggacccatttcgatggattgccgggttaggatcattcccgtatggttgaccgtaacacaaggttcgatcgttccgaaagcgttatcctctccgccccgtatgtcataagcataaataccttcgggaagcgaagctctgtcgatacgctcttaggtaaaggtgtcattcctgtaatcgttttttattggacgaatcggaggttttttgtcgatgttgcagaacagctcgacgtaatcgcagcaaggcattctgataacgatgctgtttttctcgcagcttctgcctgaaacgcagcaaatcgggatatgcctgttcgtcgtaaaatagcggataacgcaatcgctgctgcgcaatataacgtttggcaagcgtaatctgtgcttttgccgcccgcagcttcgacagacaggaatcgacgtctaatttcaatcccgtgcgtttgtcgtaataaccgtatgtcgttgtgatcgtatcacgcgggaaacggcattgaaaacgagccgtgcgccagcgtaccacccatcggtaacgttcgagcatcgtacgcggcagatcgtaacggtagagaatctcgatcggtccgtccgtctttcgaagctcgaaagtgacgattacccagcgttcgattcgtaatgcacgttcagcttgagcataggctttggccaacgccataaaatcttctgtctcgttcttcataatttgcagcatctcgacgttctacataaccttgcaagcgaatcgcagacctgcaatttcagacgatgcagcggccgtctttcccgacaggttatgcagcaggcgccatcgagcgtattgtaatatccgtgttcgggtacgatcctgcacccgcaggcacgacaagtcaattcattcatcggaaacaagttcgtttttatctgcatggcaaatggtggtctttaagctgttcggcaatctcgcggcacatccgataggaggcgcggttacggtcgtcgatatgcacgttgccctcttctgccatgaagaggatgcacgtgcgcagcagagcgaagaatcgctgctgcacggtcggatgttcgtattgcagtcctgcggcaaaggctttgcagtcgaatccgaagtcgttcagcccgctcatcaatgcgcggaaaagtttatgctccggcatctgttccagcgttgtgtgggtatatttatcctttacctgtttcatagcgtcgtcagttgttcacacggttaagcagttctcccgacagctcgtgcagttcgcgttgtcgtgccggctgtgtttcgcgggcataggccgttatcgcctgcgtcagtttccaaagcgtcggccctccggcgagtccgtcgtcgggattgttgttcatcaacagtttccgcacgccttcgttctcggttttcagcaggcggcctttctgcatgagccgttccagttcttgtgtgaagttgacctccttggcagccgcagcctttatttcgagcgctttgcgacggatgttgtcgcggccgaagagctgggacgtaaggtcgttcaccgcagacacggtggtctgcgtgtcgagttcatacgtccgctgcgagagctggatattatcgggcagcttaccgcccagatggatctgcttcattacgttctcacgcaccataccgttcaagcagacgccgttgagcaggaagacgcggatgtccaccgccccgtcgccgaaatccgaggtagaaaaacgcgctcccatatagatttgtacttctccattgaactcggtggggatgcagatcggctgaggaaggatcgtctcgacataaatcttcgtatcggtccacagcgcatcgtatgccacggctccctgttcgagggccttgcccagaaatgccgagaggatgcgctggctgtcgaggcggcggtagctgtccgagaggatgccgcgcacttcgtcgcctacggcgcggacgagaacacggctgcggtcgctccacgaggtgtgttcgttgagaatgcgtgcggccaatgtgcgtttccacgatgttccgcctgccaactcgcgcaggtaacgcgacggaacgttcatcttctcggccgcctgtcccacggcgttgtcgtgaaggcggaagcgtccttcgggcatctgcatcgtcagacgattgccgtcgtcgagaaagagtaccttgcgtgtactgcccgtttcccggtattgggcgccgatcggaagaaggtagtcttgcagctgcgcggattcgacgatcatgcgctggatggtttgttgcactgcgggtgcccggtgttctaccaggtgccgtactctgtcggctacgacccggttcagtccttgttggtgtgctacacgtgcggaggacgcactcgttacggaagtattcataaatttgaattttaagtttcgccgctcgaaccattcgggcggcacgcagaaggccatagtcggggacggggctgcccgcaaggtttttccgtaaggaaaaccggcaggacttgcgggcaggcacggacacgtctacttttgccgggccgaccgagggttgaatacttttctgaataaaacaagaaaaccgaagacgctttgcatcttcggtggaaataggaatgaaccacagtaattacataaaattttattttatgtaattacttcttgttcgaatcgagataaaatttaattatttcggttttgaagatatattcatatttggcttgcaggagttgaacctgggcttcgaccagcgcatcgagcgccgtgttgtaatcgacgacggtagccgctccgagattgtacctttgctccatttgccgggcggcttcctcggccgaggcgacgtatttctgtgaagagagatacttgtcccacgccgtccgggaatcgatcagtgcttgcgtagcctccttgttcacctgcttctccgtagtgcgtaacgcatactctgcctggcgaacggcgatcttctgccgctggacgttgtgccgcgtcgtcaggcgaccgaaaatcggaacgttcagcgatacggaaatatagctgctcgcattgtccttgtactgttcggcgagcggataggcttcgtaacggtacgtgccgtcgggattcataaacattttctgtctggcgtcggaataactcgacccgtagccggccgaaagcgaaagcgtcggatagtaggacgaacgggcgattcgcagatcgcggcgggcgatgtcgatacccagccttgcggactccacctccgggagttgctgcgccgaggccagaagcgcatcggtactgaccggcatcggcgtatctcccaaaatattatccgaaggagcgacggtatggaatgtcgtgtaatcttctatttccaggagctgacaaatattcaggcgggcgatgtcgtaggaatttcgagccgacaaaagagtgttttccgcattggccagttgcgaacgtatctgcaagaggtcggcagaggtgactttccccgcctcgaccgatttacgggtcttttcctcctgtattttcaaagtttcgaccgtctgttcggcattgcggatgttctcttcggcgcaaagaatctccagataataggccgtgatattgagccggatgtcgttgcgggccttctccacacccaacagcgccgcacgcagatcgaggcgggagcgttcgaggttatggagattccgcataccgttgaataaagtgaccgaggcaccgacagaggtcgaagtaccgttcacgctctgatgctccacgaactcatacgtggtgggatccagtacgcggccgctggagaagctgtaactgctcgatgcggagatgtcgggagcataggcccaacccgcatccgagcgggttagccgtttggtttgaacgtcgagttcggcctgcttgacttcgatattatgttcgaaagcataggcgatacattcttccagcgtccagcgttgcacttcctgtgcgctgagcggtgttgcaccgaacaacatcggcaccgaagcgacggcggcgaacaatggtattatgcggcatctcatggtcagcggtttttgaacagcgatacgataggttgtatgaattgctcgataaggcgcatatcctccgtgatgatttcgcccgtaccgtccatctgctgaatcatcggcagctctttctcataggtcgtcctcattccttcgggaaatacgacttcgaccgtataggcgatcgtcgtaccggtcgcggtttgcaccgaagccggaaccgaggaaatagaacgtatcgtacctttcaggacaccatactccatataggggaagccgttcagcttgacgttgaccgtctgcccggtttccaccttgccgaatccggccgaagggacctccatacggccgatcacttcagtctccttttccgggacgatgctggcaagagcggagccgacagtcacatgttgccccttgctccaatatccctgtaatgacacgataccgtccatcggagcgatgaccgcatactgttctttccactgggctatggcggcgagcagttgttggcgtaactgacctatggtacgttcgtactcggccacctcgttctcacgctgcacggagagttccaccaactgttgttcggtttgcaggatggtgagttccgtagaagtcagtgtcgcatcgaagccggccttgctgttctgtttggcgagatagttctgtacggaagtttcataatcggccgcagaaataaccgattgagtgaacaacagcgagtcccgctccaatgtccgctgccccatagcaaggtccttgtcgagcagtttgccctgtgcctccaattgggcataatagcgcttgtttttcgcaatctgggcttcgagaaggcgcttcttcgttccgatgagatcggtggccagataatgcctaaaatcgaggcagcgggcggcaaactccgcccatgtggattgcaggtcgcccagaacatatcggtcggacacccattcggcctcggcgagcgcttgcggcgaatcggtggcggagaggtgctcttccaacgaccggatgtcgtcgtagtcggccggtgtcgcgagcaaagcgataagctgaccggtacggacgttctccccgttgccgacacatacgctgtcgagcagtccgtcgtaacgggccgtaaggtcggagggggcattgactgtcgtaatggatatgggagccgtgacggtctgcggatacttgatgatgtagcagcccaaaacgattagggcaagtatgacgaaaatgaccgtaattccccaccgcacgacccacgaaggcgcacgtcccatgatctcctgcgcctcttcgctgtgaaagttatctctgaactgcggcataacctgtccttttattgctgtttttcagtagcagcgacttccagtgctttttttctggcgatatgtattttcaaaaaatcgggagtaaagcctttgtatggagtacaacaatcgttatgagctttttcaaatttattttgaatacgttgaataggacagcctccgttgcaaattggaaggtacttacatttggaacaaacgggatcttcaaacgtatcagcaccatatagctggcgatttaagattttttcattaatatttgctaaaataccgtctttatccaatttaccaatagcgtattctttatttcctattacctcccaacatttataggtatatccttccggatcgaatgcgatagccatatcatttctaactgcacattcgttaaaaaacggttctggataacgaataaatggagaatcaaatcctttatgtgccaaatctaaaataaattcagatcgattctcatgagtaaacaatatgccattttcgatgcatacatcacaattacttatactacgatccagaacaaatgctggtgtcaaacctatgttgcgtctttctccaaatcgattttgacaaaatttatatagttctgcgtattcatgcttattctttaaggttagattaacacgaatcgtaacattaatttcaggagcaagatcattcaataattcaatattagaaattactctttcaaatacatcttctcctgaagccaaatgctttacttcgttatgtgtctttttcattccatccagagtaatctgtacgaatgttatcccaacctttttcataactctaacagcctccttatcaatatggtatccagttgttataatatttgagttgacaggttctttccatacagcactgaacttgtcgtaaaattcttcaatctgaggaacagccataagtggttcgcctccaaaccaagtaattttgatgttttttagatcagaacatgatgtaacgtatttggtaattcgatccattacttccggtgtcatgtacttcttctctttgtatttctcaaaacagtaatggcaacggaaacaacaatccatagttggggcaagcgttaaatgcattcctgttcgctggctcctcattctcataatagaagccttatatttgagaaaatcatcttcattattatcggttaagatattatttgttaccaatgcgttccataaatcattatcaaataacatttcggataagtcttcgtcctgaatcctattatgtaaaatattataagactcttgatctatttcgattagtgcattggaaagcgtattataagcgtaaaaatccgtattctctatatcaaagaaaaaagtatatttagaaattttcattttcttattgtattaaattgtaaattaatgcatttttcatcaagaggaaaataacgagcagaacaaaatccagatggatataaacgtacaccatacctacaatccgattccatttttgttttgtcaagtaaaatatgtgcttgcatattatcgttagaccattgaattgccttaatgatttctcttaaatttttaatattttcatcttcttctgcactttgaaatccccaagtgccaagcatcggttccgaaaacgtaatcacaatttcatcaaagttggtaatatccgttccgtatgccggatagatatttgtaataaatggacagctatttttatattccctatagacaatatcaaattggctggcagtgtagttgaagaatgcaattaattgaggcataaaatcttttatattaggatatctgtctcgataggtataaaaattatccataaaacatacacttctatcaatccaaatgaaccctttttgcataataagcgccgttgtcataggtaccatctccggggttgtttccctatagtacataatcgtaaaaagattattcaaccactctatcgtcatagtttctgcccctgcatatccggcttgattcattgccgattcgacatagggatagatcaattctgccgcatctctcatttgtgtccaatactcaaagacaatttgattagtaaagtgatgtccccattcatgaataagcacaggtagtgtattataattagtcggattgggtaagccttctgcatcatcaaacactccaatcagcacgctattatttcccattgcataattgctcgcaccattgacaaggctgatatagacttcaggagagaaaccatccaacgatctcccgaaaaaattttcaaaccaatcggtatttgctcttgcaagcaaggtatccattcgttcttctgcgaccttatataatttttgatgattcttgtaaaacttttgaaaattacttttatcgtagaatcgattgagcatggtgataaattctgtcaatagtgattcgttccagcgcgaatcacgttcgaaaacatcgctcatatcatattgtggttgcaaagaaataatgccatttttaatttgaagtaaatcagctacgttcgttatggcattataaccgattccatgagcctgattaagctctcgcatgtattttatagaattatcagacttgtatttctcaaattgattttgaatatcttgtttataggatcggactccacattgattatattcaggagctcctgccagcataaatgcaatactcgtaagttcaaaacgctcgtcaactttcgtttgaatctgaccgcatgtaatgccagttataaagctaaaaacaaatacaaaaaaaattaatcttttcataagatatagttggtaagttttctgaattttagggagaggagcattcctctccctaaaaaatatttaacccaatggcggcgctattggaccaatatattgtttcttagcgctacaaggttctgtcacaaaattattgaaacatgcacctgcaccttgataatcccatccaatatcacaagtaccccaccgaagttgtccggggcacatagggttggtcgagaatcccccagctaattgtgctccgggttcgcatattgtaaaatttgtatctccaatgcatttacctcctacaatctgctttaaattttgtttattcagaaatctactttcctcgatgaccttaaactttttcatagctttcattttttgaaagaatacattcagttcgttcaatcggttttgcgtgcgacagcaccggaataaactgccgtttcgtcacaataatgcaaattggtcggaaaattgtatttttgcaactgcctttcttgcgtttaagttgaacttatgagccgtcacactctgttttgctttctcgtaaaaatggcttcggcaaggtgagggcagcgattttcactgcctttgccgaaccggaaaaacgaaagtctaaattttccattttattgaagaaggcaagtctccaatagtttattaaagttagtaatttttctttaacttcccaattccaactgatttttcaccagtccgtaataatatcctttttttgccgtcagctcttcgtgcgtgccttgctcgacgatgcgtccgtgcgccaaaacgatgatgttatcggcattgcggactgtcgaaagacggtgtgccacgataacgacggttttgcctttgaataatttctccagacgctccataatcgtgcgctcgttgttagcgtcgagtgaattggtcgcttcgtcgaagaagaggtatttggaatctttataagcggcacgggcaatcaataggcgttgtttctgacccgtactcaacccgtgtccgtcggctccgatacgggtgttataccccaatggcagcgattcgatgaactctccgatattggcgatttccaccgcccggcggatccgtttcatatcgggtatttcatccgatacggcgatattattggcgatcgtatcggaaaatacgaaactctcctgcatgaccgttccgcactcctgacgccagcaattcgggctgaaagcggagagcctgcgaccgcccagcaacacgtcaccctcgaccggagcgtaaaagccgagcatcattttaagcagtgtcgtcttgccgctgccgctttcgcctacgatggccgtaaccttgtcatgcggaatcgtcaggtcgattccgtccagcactttgtccgagtgcggcccttcgtattgaaaaactacgtttcggaactcgatggccgcgttttcggggatgtcgcggatcagacccgcgtcttcgggttcctcatccggtttttcctgaatttcgttcaggcgttcgagcgagattttcgcatcctgcgtggcctgcacgaaactgatgaactgcgatatgggggcgttgagctggccgatgatgtactgcatggccatcatcataccgagcgtcatttccccattgatgacggcactggcggcaaggaacgagatgataacattcttggtctggtcgatgaacgtaccgcctacttcctgtgtctgtccgagtgtcaggctcttgatcgaaaccttgaacagtttggcctggatacgttcccattcccagcgtttctgcttctcgcagttgttcagcttgatgtcctgcataccgttgataagctggacgatattgctctggttgttggccgactcctgaaaacgcatgtagtccagcttgcggcggcgtttgaggaatatcaatacccacaggatataaagaccgctgccgagcaggaatacgccgaggatgccgagatcgtacccggccatcacgacactgtatatgacgagcgacacggcagccatcacgatactcagcaacgaaccggtcaggaatgtctggatccggttgtaatccccgatgcgctgcatgatgtcgccgaccatcttcgaatcgaaaaacgcaatgggcaggcgcatgagtttggccagaaagtccgaaatgagcgagatactgatgcgtgtggtcatgtggagcatcaaccacgaacggatgaggttgttggccatctgtccgagtgtcagcaccacctgggcgatgagaatcatcaccacgaacgaaaggttgctattcccgatacccgtatcgacgaccgattgggtcaggaacggaaggatcaggccgagtacggcagcaatcagcatcgcaaggccgagttggagcaggtaggatttgtaaggccgcagataacgcagcatcgaggcgaaattcagccgtttatcctcatcgcccttctctgcatagaactccggtttcggctccaacaggagggcaatgcctttggccgaggaatcgccggaaaggtcaccttgcaaaacggaatcttcggctccagtctgcaaccacgatttgagaaattgtcgttcgctatatttgagtaatcctacggccggatcggaaacatagacccaccactgcccgcgtttcttctcgattttatagacgaccacaaaatgtcgctggttccaatgtacgatgcaaggaaaattggcttcgtcgcggagctgctgccacgtgagttttacaccgaccgacctcaaaccgatactttcagccgcatcgctgatacctaacaacgagacgccttcccgcgtgatatggcagcgatcacgcagattttgcagggagtagtgccgaccgtaaaatgcagcgataattcgcaggcatgtcgggccgcagtccatcgtatccaactgtgtataccgagggaaactcattattataggttttaattatcttgataatcaaggagaagaaaattcttctccttgatctcaataaataatgccgtttctaaatctaatactatatggcaatcaacttacgcacctacatgcctgcaatcaattgcttgtgttgtgtcgccacatactgtggcgcttgcacatgcaaattcagagcaatgcatatctgatttacattttgcatcttttgtaggacagacatctaccgacggttcacatgttatagtcgggaagcaattattgcatgtaccgtccgttggtttttttaccgtgatttctcccttactacaccctccttggatgcgtcgtactgaattttgagaaaggatttcaatggtttccttttttagctctaattttttctgacttttcataactaagattttttaattgtacatataattactgtcggccaacagttaattttattccaaatcaccaatacatcgcacaacacttcctccacaaatctctgcacaagtataagctgacggacaattagttcctgtttgtggatcacaagtacccaatgaacagtcaagagtacacttttgggttttatttccgcagtcttttgatatgactgtaatttctcctttgctacaacctccttgcacgtaccgcgcagcaataggagtcagagcctcgacaatctcttttttgagccgtaacttctttgagtttttcataataaattcatcttagagattagctctctgtggctaattggagtgcatattccaatacttcatccctattgtttctaattccatcgacacttggccttacctcgatgtccactctcacacctcgtcgttgagtatcagtaccatctgggtataagacttttacacttgaaaaataaaagttcatatatcctggcatcgttacaaggacaatatccccatctgctcctgctgtttgtgagccgactgttatcgcgtccggtatggattgaagatgcattgtaaaatattctgcggcgctttgtgttgtttgatctaccagaattattattttcccggtatatgcattgtgattttctacattatgccaagtacctggattcgaagggtcagttttcatttgctttccaaatacagggttatcaattcggaaaaaatatcccggacagccccaatctggtcgatatattttagtcggatactgtggtatatggataaggtattctgcaaagaaattatagagagtaaaataatcccgaggatagcatcttaaatctacaattaaagttttggtatctttgatagcattataaatctgttgagcatcctcactttgcaatgtgccagcatagatataggatacactgtcattaagcatacgaaaagacactttagaatcctcacattttcgtttttcggcataataatccgaaagttttatggaaggtatttttatctgatattgctgtccattacgctgaaatactaaatttaaggaatctttaggtgtccaaaatgcataatcggcagcatcacgcatcaggacggattcgttggattgggcggtgtattttcttgccatagatattatctcagaaattgatcttccaccgatgacggtaatttcatcgcccggtaataataactgattatcaaaagtatctgttacaaaaagtcgtccttcgaccaattgtcctaaaacaggcgctcgttttgccccgaatattgctgaatatgggcctgatgcgtgtgtatcgttcaattcagacaagagttctaattgggttaaaatgtaactgtccttatcaagaatcatccggggaatatatttttcaagtactttatcccaagaagtgtctgttatattccggttaggacaataactgtcgatcgcattccaaaggcgaaacaaaattaataagcggtatcctgcatcgtataaatggttataatcataattgggaaatggatcatcatacagttttatggtgaccccttcattccatacatacttgttgcttttggaaatagcataccgtaaatctgataaggtttggctcaatttacttcccagtcgaacggtatcttcgacccatgaaaaatcatttattagaatatgatcgattgcggatagttcttgttgaaaggttgtatcgacttcaaatgcacctaattcattaatccattccgacaggattcggttgcgttccgcttttccagcgtgtactacgcgcggcaacaaaccgaaaagctcatagtcaatatggatagtcgtatcagccatagccgggtgatgatatttcacaaatccccaaacccgagccagagtttcgagattatccaatactaatggatcatacgcatcgagcgaatcgagttcaaacccggaagacgaattgtaatcaggataaatgcgttgttgcgaatagctaacaaaggtaccgcagaataataaaactattaatagacgataaaaacgggacatactataaatagattaatcaactaagtataaagaaattcagccattcagtattttgaagggcaggtatatataaagacaataatagtaatccgattcctgcaactccttccaaaagtccatattcatttacccaacctccgtattcagccgtatgccatgctctatatccggccaatccatcctccatgttacctaattccaaggtaccgtcaagccagtaatcacgggtttcttcaaacagtttttcaccggtttgcatatacacatagtgaaacatcatacacacgcttgcagctccatgacataaaccggcatcgataacaccggcattttggaaatccctacgcgaagtcgaaaaccgcagcacctccaatgctttttcctgccattcccggttatgcaacgcttttcctgcctgccacaacgatgtcgctacgcccaaatcgccatagcaccaacccaaacgactttgatgatttatttgctccggatcgttctctaatgattgactgggaaaataattgccgtgttgttgcggatcgatctcctgggacagaatataattacaagtattcctgatgatccgatcccgtttcttctgatcgatcccttcgcttcccaacaagctcaatacggatacgatactcgacatcccgtgtgataggcagatattgtatccgacgcctctgtccagtcccagcgaagatttccatttgtagattctatctcctttttcagcggtttgctccaatgcctccaatgcccggtttacaaactctgcgtcgtcgcaataatatttgacgatacccagtccgccatgcaggtagtcgtaattcccgtttagaatactgtttatagcgaatgtttgcagcagctcccggtagtttttctccacatcggaatagtcgatctccaacaaccgctcacggttcaggtatttcaaaccctccaaagcgccggtaaatccgccgcagtatgtcaataatcctatttcagaggttaatttatcgaaatacgtttcgaggaagccttctaaaatttcttctttctccgaattgggaaatacttgcagatagtgtttgcagaagataataatgccggtctgtccggccaacaacccgacgccttcgttgtcgagtttaccgtctttcatatcccgaaacagcacatcggctattgcatggattttatgttcgattcgcgttttcattttaccgaataggaatgaatactttcattgtttttccacaagccgctttgtccgtgcgatcgccgactcgaaatacttggttaaaaagtcataaataaccaattcgaactgccggttattggtacggaaccaacggttcatcgtcatgtgcgaaatgctgcccagcaactcgtcgatcgtaggtaccgccaggccggaggattggattcgggaaatttccgcagcgactttcccgatttccgacttgcgaggttgtaatatggcttcgtaatccgtaaacatctcgcggtcggacaacgctttttcgatgtccgctcggtaacggcggtacttatcattgatctgtttcgtgaacgaatgcgaggtgaatccgaactccttcttgaaattctcggccatccgggaaaacagtgcttttttctcgtccggtgtttttccgaaggcggtcatcgtatcatccagtaatgtcagtgccaactgccagcgggtcgtttccctcgtgtccgtaggtaattcctcaatcttttcgagtaatttcagaatcgcaccgctgtctattccgaacaatcgttcgaccggctccatagtatctgccccgtaccgttcgatttcacggacgtaagtatcgcataaaacccttataacagccccgttttccaccaaaggctgaaacgacgcttcgaaacgccggaagataggggcgtagttctcgaatcggtcgatgtggagccgcagacggatatggaaatccgggtcgttataacgaataaagaagctgccgtcgatccatcgctctgcgtacagttcccgaagaaatggccgtatggtatgcgccaaaacctcatcggctgttttgacacctgtgtatattttgaagtatagccattggctaccgggtatgaactttctctgtatcatgttgctcgtttttatgaaaggcgaaaatcacctcgttcgtaaatcggtcttttccccggcggacaataccggagtcgttacgaaacagaaattcctccaatacgatctgtttgcgtttggcgatctcttccagaagaagtcgttggcattgtgtatcttccaaattcaaatagagttcgttgtcgctgtcgggaataacgacttccgtcggcatttgtcgtttctgtaaaaaatccctgaagcggacggaaagttccgaatcggataatttgtccatcccttcgacctcttcctgtttgattctccacagttctctcgaaagaataatgttcttgtattgaatccgaggaagataatcataagcggctaaaagtcccgaccaaccgcaactcaatccgccggttatccgttggtgttgaagatcgcagaggaaacggtaaatcggaatgggactcatcgaatagttatgggcacacgttaagcggggaacgacctctttgtcgtattttttggaacggagaaacagacgtccctgccgaatggaaagcatcaagtccgatatgggaatatccgttccgtcgtgttcgcaattcgacagataatgcagcgtatgttccctaaataccgggcgcgaggcgatatttccgatgcgtgattcgggaagatgcgatatttcggcgaagataacgtccggagtttgccgctgctcgaaatcggcgatctctttgaccagagccataatactctcgtcaatatggcagaagcgccccaaaaggttggccgcacatactccgccgatcgattttatgtcgattagatcgttatcgagcaggctgcacataacggcaatcgtatcgggaaactgatgtttgtagtccagtttctcgaaatccttgtcctccagcaatacgacgtggcctcctttgcgggcattttcgatatatttccggaataaaactcgatcagcagaactttgatgacttgtcgtaatattagaatattgaacagggaaaacgagatcgttaatcagaggattgacgtcgccgctacccgatgaaaccggataacccaatcccaactccccgtccaatgccacagccaacggaacttcggcctcttcgtaccggctttggaatgcctgaataaaattttgcagcgtgggatgttcgttcggtggtgtaatcttcgccagaaagtcgatcaaacgaacgattcgagatacggttttttcatccacctgtgcccgatgcaccggtttgaacatatccgtctgaaacagatatttcggctcgtagcctacgccgatattttttacggtcgataaaatctcatcatataacggcagtgtcgtacctaccggttgtgcgtcgattcggttcagaagctcctggatttgtcggagcggttgcaggatcggaacattttgcaggcgggagagtttatcgataagcgtatcgagtacgtcttcaccgacgacacatggatcgagttcgcttttcagcacttgcgaggcgatagtctcgatgacatattcatgcgcttgctccgtggttatctcgtcatcgacgagtgcttgcaccagttgttcgattgtcgctccgtctgccgccgtgttcaggagcgtggccagcgcttcgtcgatttccaacgaagcaaccgtatgctggcgctgcgatttcttatagcgatattcgacatagcgatattttccgccgatttcataaaggctatcattcgggtaatatacgagttgctcccgcacgttggggtcacgctcgatctcctgaatcagagcacacagatattgcatgtccaaccgggtgcggcgtttgttgtccttcgtagccggtaattcgatcgatgtactgttcgcaatctttcccgtgctgcatcctgcgaataaaccgaacggagtacaccgtgtcatcgcccgatgccggtatttcagaacggaatgttcgaatttagtctgcttttttcggtctttcgatacacaaccttcatacagctccggcgaggctaaatagagcgcttcccgaaattcaggactcaaggtcgtatcttctgccggagcatccagcggaaataatggcgtcctgaaaacaaagtcgggaaaaggggcaaacgtcggtttcattatttgggtgattgttcagttagtaattctgtttccttttatctttttacaagatacagccagaatgatatattggcaactgtttttaagaataaattcatttggcatttattattttcaaaaacatgtgacaaataaggaaaaattcattaaatttattggttcgttacgatctaaataaagcagatacaaaatatcatatcttttatcggtacataacttatattagaaagctccccctctcgtattaacgagagggggagctttctaaaatttacttgcttgcttggttcctattcgcaattgcaagtcaatgcgtaagtgttcagacaatcgcatttagtttggatacaacttcctcctgaaactatacagtcatttttgcttacttctacacaggctataacattatccgacttacatgtagtagcagatacgcacaaccccagttgatcttttgttgcgcaatttttttgagttcctgcacaataattcgttgcaggaatgatagtagtctgtcctgcaccacctttaaccattgcactctgctccctgtcaagacgggataccacgtcttttttaagttttagtgttttcataataaagcagttttattagttggtattcgaaagttataaaaattcatcaaacaatgcaaatattttattgttttttttataactttacctttgtgagaaagaatttgtgtgatgaatcggtgtaaattgtcctttgttatattatacctctgtgtcgtcacatggccattggtattgttgcacgcgcagaagaacccgtttttggagcaaatccgtaattttccgcaggagaagatccacgtgacgaccgaccgcgacgcctatatcgcgggcgacacggtgtggctgcgtgcgcactgcgtcgacgccgcgacgctcgaaccgctcacggcgagccgctacgtctacgtggagcttcgcacgacggacaacctgctcgtgcgccgcatcaagattctgcaacgcggcggcgtctatgccggctacctgcctctgcccgcgacgctcgcgcaggacgaatacgtgctgtgcgcctacacgctctacatgcgcaacctcggcggcgactatctcttctcgaaacccctttcggtcaatccctaccgacaacccgaaaaacgacggcgccgcacggcggcaggccccttcgacgtggccttcttccccgaaagcggctacctcatcgacggacagccctgccgcgtggggttcaaggccctgggcaaggacggactttcgcggcaggtgacgggaaccgtgcgcgacgaccgtggccgcaccgtcgcgcgtttcgcctcgcgccacgccggcatggggtcgttcgagttcacgccgcggcccggccggcgctacacggccgaatgcgtccagacatcgggcggcaagtcgcggcgcttcgatctgcccgaggccaacgacttcaccttcgtcctgcgcgtcgagcccaacgacacctccttcgtcgtatccgtccgttcggctaaaaagtggcggccgcagggattgaagctcctcgtccaccgctgcggcacgcagtgctactacaaggagtggaacccgcagcacgcatcgctcaccttcctgcgcgacgaactgccgggcggcctctaccagatcctgctgctcagccccacgggcgaagcctactccgagcggctggtcttcaaccgccgcgacgaagagaccgaggtgacgatgcggcaggagggcacgttgcagcagcgttcgaaggtaacgctgcatttcgaggtgcacgacaccaaacgccgacccgcacagggcgacttcgccgtcgccgtcaccgaccgcaaggcggcggctcccgtagcgacggcgggcatctactccacgctgatgctctcttccgagctgcgcggtgtgatcgaagaccccgactggtacttcgcgcccgacaacgcgcagggcgacgaggggctcgacgaactgctgcttacgcagggctggcgcaggtacgacgtgccgaagctcctgcgcgacgaatacaaggagccttattacccgttggaggcgggacaggagatcgcgggacgcatcgagcgcacggccatgttctccaaaaagaagaagctcgaccgctacacgatgcggctgctggtaccccagagcggctacgccacctcggctcccatcgccgaggacgggtcgttcgcactcaacgggttcgacttccccgacagcacgaccttcgtgctgcgccccaccgtccgagggcggacgatcaccgacgcgcggattctcatcactcccgattcgtttcccgaataccgcacgctgccacgcctgcggcagcccgatccgacctacgtggcgcaggcgcgaaggtatatcgagcagcgcggcacggcagacatgcggaatatcgtcatcgacaccgtggtcgtgacggcaaaaccctgggacgacgacatcgacgaaaacgcgccggaacaccgcctggccgcacggtcgtggaacgccgagcagatcaaggaggtcagcgcagggacgatcctcgacttcatcgagaagatgcccggaatgcaggtcatgggacgaagggtattataccgtgggcacaaaccggcctttatggtcgacggaagattagaggaaacggttggtatgttatctgaaaagcaagatggaagggaagtaaatagtttggattacgactctggcaaagcaatctccgcaggtgctttgagagctttggttgcaataggaaatattgcacggaatggcggttctgcttcagatctcagacaagcagctgcagactatagagaaaaagtacaaaatgacgaatggaaacgaggtatgcagtatttcgatgattttgataatgtccccgattgtttgtattacccgatcgaacaggtagcacgtatcgacctgatcgaccgcaaccagacgacctattgggggacgaacctcaaaggcggcatcatagccattaccatgaaaaagggaaaagcgctggccgaagcgtatgccgctgcaccatcgccggacgtaagcgtagtgacgccattgggttatcaaacccctgcggagttttactctccgacatacgacaccgaagagaaacgtagaaccaatacacccgactatcgcacgacgctttactggaatcctgtcgtcaagctcgatgatctggggcaggctaccgtcgagttttataccaccgatgctcccgccgattatgacatctctatcgagggcgtatcccaaagcgggaaaattatctctttatcgaaatcgtctgtaaaaacagaataaggatatgtacacgattatgtatagtgcgttatattcatttctcgtaatatcgactttctgaaaataaaagtacccgaaaaacctctactcggcttttcgggtattttcgaatttatcggacgaagcgaaaccgctgatctcttaccgccgttttacaccgtgtattcgattcggcggcacggagggaacatgcaggtccggaatgtcgtcgtacttgttccgatgcggttgcatgccccgtcttaggggatagttctttttcagtatctcagcggccaactgtcgggttcgttcctgcaacttccgctgcgccgccgaactttccgctgatgtttcgtattcgcgtgccagcgtttcgaatgcttcggcactcgggaaaaaaccgttcataatcccgtacaccattcctccgcccattccgttctgctgcatcgtctgtaaaacggcgatgtcgaaactgtagttgccgtaatgcggggtgtgcggaacgtcgtcgatcaatttcttataattctgtaccgtcggcgccagatcgaacgtgtcggtccgtatgccgtacgccagcaatgctttcggggcgaatattccgggcggtatctcgtcgaaggcataccgtcccttgtctttgtcgtcgcgttcgagccggaatagatcgacatacttctgccagccggtatcgaactgcgggagccgatatatctgtaactgcgtatcctgtaattgagggtggaagaagtgcagcagatagtagtcccacatctctatgaaacgttgtgctccgaggggcgtttcggtaaatagcagcaatccctgccgagtctctacggctgtcagggtgtcgaatcttgacagcggtttcatccctttgtcgaagccgaacatcgcacgctcgtagccgtcgtggtaccggagccgttccaactccgcctcgggcgagaggtagggaatattcatctgccagcaaaaggcggcatcgagcaggcgcacgatgcgctgcggcgccacaccctcttcgagcagaatcggcaggctgttttgcaggaagtcggggccgatgagccgctcctgctggcggatccggaggagcacgtcgtccggaatcgtgtactgaaagagccagtagtcaggatagtttcctcccgagcgctgtccctcgacattgcgttggataaactgctcgaacccttcgcccgtatcgtttcgaatggcgtagtcccgtactttgcagtgggtgtcgagcgcaaaatagaactcaaatccgtctttctgtggtcgtgtcataggtcttcaatgtcgtttcagatgaaattccgcgcctcggaccggctcgtcgcgccgcctctgatatgcttcgagcagcttgtcgggacggaagagcagatttatggcgtcgaaattccggaaggtgcggattccttcggcctgcatgggaggtatctcggacgaaggccgacgccgtatcgggaacttccggtcgaggatgtaggcggccagattgtactgctcctcgcgcttggccgcccgcccctcgtccgagaggtcggaggcgtacttgcgttcgatgttgtcgaatccgctgcggaagacgaactcccggttccaatacctttcggcattctgcataagatacccgtagccgcgctgcatgatgatctgcaaccccgtaagatcgcgtatgccgttggagacatacaggttctccccgtgctgcggatccacgaaggcccagaagttgtcggccgtagcccgcatgtcgtactctttgaggcaatatccgcgacgcagaacctcggcatcgacgaagggatgctccgggacccacatcataccgcctgccgtgggaagcacctgcggattcaccttgtcccagaagccgtcgggatcggcctccacctcgtacacgcgcagggtttcaacccccagatcggggtcgaagaagcaatcggcgtgatgctgcatgtagcgttcgcaggcctcccgaccgtccggctcctgcgtgaagagcaccgcaccccgctcggtctccacggcacggcagcgccgcaggtcctcacgggcgaccggtggcagcccctcgttgcggaactgtcggtagtcggcctttgtcgagagcatgttgccgcagttaccctccgcaagggggtcgaggtcgtacttgtaacagtagagaaggtctttcagcgttacagcgtgccggatgtccagcttctcggtgactgtggacggatccagcaggtaattgtgctccgccgcttcgatgcggggcagcaacgcggcatcggtcgtgcgtatgtcgaaaaacagcaccgagggaatcgccccgcaattggcggcgtagtccgtaaattcgtcgagcagggcgcggaatccttcgtcgccgcgacgggatcgctccatagcgataatcttgttgccgtcgtccacggcgacgtacaacgcaccctgcatctgttcctgatcttgttccatcgtcattagtgtttgagaatgtgacaaggcatctctcttctgtccctgtcgcgttcgtagcgctccaacagcctctcgggtcggaacagcaggtcgatagagagaaaatccctgtaaaagcgaatgtctccgctcggcagcggacacggcggctcctcccttgccggatcgatgccgaagcaagtgcgcaggatgtcggccgccgtcgtgcggctgtcgtccgtcatggccgctgcaggtttccgatcggcgttcttgaaccgatccgcgaacgggaagtcgtatcccggaaagtcggagcctccccagcagaaaggttcgtagccgttgcgtgcgatatgccggagcgttacgaccgtcagcaggcgtcgcaacgcctcggacgatgcctcggttccggagtccggagcggccgcgagcttcgcggccccggcccgcatgtcgtactctttgaggcagcagccccgttgcaacacgctgtcgcaccgtccgctgtggcgcggcacgaagcgcatctgctcgtggtcgaaatacggcaggcacgcctccgaggagtattgctcctcggagagttccacatcgtatatgcgcaaagtttcgaccccgcaggtgagtcctctgccgtcgggatgtgcggtgaggaaggcgaagaagctgcgggccgcctcgtcgccacgttctccacggcggaaaagagctacgccgccctccgtttccacggctctgtaaggtgctccgggctgcgacagcgcgggaatcgattcgttgcggaagcccgcgtaagcgtccttgtagcagaggttccgggcggtgttctgcgcagccagcggatcgaggccgtgcttgcggcaatagagcaggtcgtacaacgtcagggcttgacgaatgtccttcacttccagcggtgccagatgtgccagccggtagccgcgttctttggcttcgatcggcggcagccgcgagctgtcgtcgatgtgaaagttcaacagcagaagatacgggatatatcccttgttggccgcataatccgcgaactcgtcgaagaaggttctgaaaccctcgtcgccccgtcgggatctctccagcgcaacgatcgtatgggtacgatcgagggcggcatagacgttcgtaatatcggaacttcccatccgttatcgttttgtgtcgtcccagtcgggtacgacgatcgtgccgtcgccttcgggcgcgtagatcacctcgatctcttcgacctcatggaacgtgcaggcgccgaggccgcaaagtgcaagcagaagaagcatcgccgcgaagatgcggcgcagatgatttgtcgtcatagtatcaattttttaagagttcatcgatttcggggtcgagcgccgcacgatactccatgcgctcatcgcggcggcaggcttcgaggaagtgtcgccgtccctcggccttgcggcccagccgcgagcaggcgatcgctcgaagatactcactcgtggctgtcgcgggaagtgcttcgaggatgcgcagcgcctccctgtcttgtcccagcgagagcagtgcgatggccgtattgcgatcccggtagtcatgaaggacgtagagcgcctgtgcgtatttgcgtttttcgagcagctgccggccccgcaggtaggccgtatccagttcggtcgtgtggatcgtgtctttgaccatacccacgcggcgcagatggcagcggagttttacggcccgcagcgcgggatagtgctccgcacgaatacaggcatattcggccggatagcggcggcgaatctcctcctcgcgccggtcgggatctccgatgcggcggatgatgccgagaatctcgtcgcggtgcgcgaggcggtcgtcacgggcgatgcgggccgtcagctccggccacagctcgcccgcactgcgtatcgtaagcaggcggtccgcacgccggccgaagcatcccgcaagatagctgcgcagcgcctcggcgcgcgcccgcgaaagccgctcgttgagcccacgacggccttcgggcgaagccgaagccgtaaggacgatgctgtcgacatggaactcccgctgcgtgacgatacgttccatgagtgcggcgatgcgtgccagctcccgtgcgttgtcacccagcgtatccacgagccgtgcgtcgcccgtaaggaagctcaggctgtaacggtcgttgacggtcacgtatttgtcgatgacgcggatacggtaccggggcagggtgtccagaaacgacagcagcgacgatacggtataggtcagcgtatcggacggcggcagcgtataggcgctgtcgtcgagcccctcgacgcggccccgcagcgtgatgagcatcttgcgggaggtctcctccgtaggtacttcctgcgaataatagtagctgatcgaagttcggttctcgataagcgaatcgagccgtgcatcctgcgcatagggatatttcacgaaccgctggaaagcccgctcggcccgcacgctgtcggggcggaagcgtcccaggtaggtagtatactgccagtagtcgcgctgctgcacgcggtcgaacagcgcaccgcgtatgatgatgtcgtcgagcggtatctgttcgtcctgccggtgcaggaagggcgtgatgaccacactgcggctgcgccccagcagctctttgggcagttcgacgttgaagtcgagcgtcacacgcccccggcgttcggggatcgaacggacacgggccacgacgacgacctcctcgatcggaaccgtgccgagggcttcgccctgcccgtcccgttcgacggggacaaggtagtagtcgctgctgtcgcgttccacgcgcacgacctgcgggcggtcgtcacggactttggactggcgttctgtacgtgagagttgcgccaggtgtgccgtggcctgtcggcgcgtcagccgtgcggtcgtcgagcagcccgcaggcacgcctgcggccgtcagtacggcgatcagggataaaatgttacggaatagcatatcagaacaggtagttgaaggagacttccagtttcgacggtgcgagcgtccagcgccgcgcgtggcggatataacggtcgccccagtcgctcgtgaccggatcgcggcgcgtgtcgcgcgtgcgataaagtcccgcaccagcctccacgacgaggttccagcgcttcgagaggatccacgcatagccgtagcttatgccgatgccgtaggcccgcccgtcgtaggtgcggcgacgattgccgatgcggtagtcgacccaggaggcgtgcagccccagaaagtgcccgacgaaatcttcgtagaaccagtgtcggacgccgagttgtacggccccgacctgcgtcgtgaggcgctccgtgcggatcggattccagtaggcggaggtttcgacggtccagttgtccgtcagcgccgcctcggcacccacggcgaccgtgcccgtcagcgctgccagggcgttcaccctgacgccgaagaactgtgcggcggcacggtggtgtatggctgcgaggcacaccagaagtgccgcacagcggatgatcgttttcgtttgcataatcggttattcttttacgcacctcacaggataggctgcggcctgatgattctgacggtagagctgcaagacctcgggcggcaggacgccgaagctcacggccgtcgtcgcatccacacgtgacggatcggaggcaggactccccgggacattcgtccagagttgtgtccgtatcccgacgccgacgtacatctccttgccggtaggcatgacatgcagcagccccgcatagggatagtacggccatacgctgccggtatagaggtagcacccgccttcgatagtgctggaaacagtcgtctgttcgagcgtccacgcctcgggcggcggcacgcgccagcccggagggcaggggtcgtagatggacttcgcgcccgcagtcgtgggacggccgcccgtcgaggcgttgccccagaggttcggcgaaggttgccccagccacgagctgagacgctgcgccggatccgaagggtctgcagcacgccccagaagtgtcgcgggatgtgccgcagcccacgtcacggtcgccgtcgaagaatcttcgccgtagtatgtcccgaaggcgaacccttcgccatagtcgaacgctgcgagatcgtacgggaagggatccttgcggccccattggtagtaaaggcctcggctggccggatcccccggatcgaggttttcagcccccagattacggtccataaacacatatcccgaaggatagacgtgggtggtcagagcgccgttcgtcgcccagatatgccacgaccagatgcagtcgccgtccttgtcgaacagcccgataagggcgttgcctccgatggccgtacccgtgcggaagctgatgcggctgccgttgtagcccacatcgcatacgacagcccgctccgccgttcccgtctgccagataaggcgggcggatgtccctttgagtttctgcggcgtgatgcccgtggtcgctcgtccgttgccctgcaccgttgcatcgaacagatatatctcctgcatgcggggcgcgatgtagctgttggccgtacctgcggcactcaggtcggtaccttcggcgtagtcgggcgcgatgatccgctcctcggtggcgacgaaggaataggtcttatcggcggtgataagctgccggcggcttttgtcgaaggcatcgtaccagcccgtgagcaatgccggctccatagcgcgaatcgtgcaacgactgcccgcaggcacgatgaacgactcctcgtcctgatccacctcgacgggcgcgtcgcactcgaagcgtacggtgtagatgtccgtcaggatatgtactttctcggttacgaagagcggataaagcgacgccgcatacgtcttgggcacgtaagaatacgtttcggactcgcagagcagttcgctatgcccttcgtcggcgtaccatcccgcgaaacgataacctgcgtcggctttcgccgtgagggtgcaaccccgctcgtagcaggcggcacgcagcatcccgccgttcgccgtttccgcgtgcagagcacccgccgctgaaaccgtaccgccgccggacggtacgacgtagagcgcattggcgaagcagtgctcgaagcggctgcggctctcgtatccatagctgtcgcgcacacgcacttcataagtgagccgtgcgcgagcttcggtgatgaccttcgggtaatagaccagttcgtaatagttcgatccctgctggcgattgatcggaaggtcgaggcgggaagcgcactcctcgtaatcgacgaggagggtcccgtcggtcggggtcagcagctccagctcacccgtaagtgtcggctcgctcttcgtacgttcgatattcacgtaaagcgaagcgttgaacggaagtacgcaatagtcgccgatgcggttgctctcgaaatcgtcggtcacgctcaacgtatagccgtgtacgcgggtgtccacctcattgtcgcccgagatcgtgatgtcgagcgtatgagccgtgttacgccctacgttgaagtccgtcgtattgttctcacccaggtaaatgcggtagtcgaggatgcggctgccccgtgtggcgcggatcatcaggtacgaagcgcacgcaggggcgttgtcggcggttttgtcccgctggtccgtaatcgaaggtaccgtgccctgcgggttctcgaagaggtattgcacgcccgaacagctgcgccgcgcggcgtcgggaagctccacgagcggagcgtcggtgaaatccttctccgaggtcgaaggagtactcgcaggcgtgaagggcgtcgtatggccggggacggaacacaggcgtacggagcgcagttcgaggtcggggaccttatccgccacgcggatgttgtaggcgatcttggccacggtacgccgcacgctcaatggaggtaacgtaacggtgttgttctctttgtcgggcgcgatcgcaacggtcatgacggccgacatgggaagcgtcgcatactcctcctgccacttgatcgtatagtcgaggagctgctgcgcactccgctcgcccaggtccgcacccaggttggcagcaacgtagagatcgtactccccgggcaggcactcgaaccgcaccagcgccgaacgggagtaaaaatgcaggctttggccgttgctgcggccgaacaggtagaggttgatgtcgcggatcgcctcctcgtccgccgtgcgggtgatccgctccgcaggatcgggagaaaattgtagctcgaccttcacggagcgggtcggaggcgtggccgtcgcagcaaggtcggcggcacaaccccagccgatgccggaggccagcagtgagagaagaatgagtagtcgtgtcatggaaacttgaaaatttaggttcatggttattcggcgacgcatcgcaccggcaaggcgtagtcgcgttgttggtatgctgcggtattgatcgtcgaagcggaaacggtgaacgccgtactcgtggagaggcagcgtccgttcagctgagccggagcgttcgtccagacgtcgacccgtgtgccgttatcgcggaaagcgtgacccgtaaagtaaccgcccataggataggttacggaggtgccggtgcggctgcggaggtagtaaacattgttccgcgaggtgccggtacggctgaaagaagcctgctcgaaagccgcaggagccgggacccgccaccccggaggacaggggtcgtaaatcgacttggaactcgacgtcgaataactccccgaacggctggcattgccccacagattgaggttctgaggcgtcacccagtcgtcgatgtcgttgctgtcgcccgcatacagccccgaccagtaggcccagggttccgccaaagcccgcgctggggtcatcgacacagagccgccgtcgagcagcggatcatggacatagtactcgtatcccgcagcggagataaacgcagctggtaccgtgctcgtcacggaggagggatgaagaaagggggcggggcgtccccactggtagtaaagtcctcgcagcgaaggatcgctgacgctcgttgtgagcgctccgagattgcgatccatgaacgtatatcccgaagcgcaggtctgggccgtggcccaaggatcgtagttcgtatgccagatatgccacgaccagatacagcgtcccgcagcgtcgaacagcccgataagggcattgccgtagttcggacccgtacggaagcagatcgtactgcccgtatgctccacctcggcgaccactccgccccgcgtcccaccgctctcccacagtacgcgggccgtcgtgcccgaaagcgtcgcgggcgtcaggcccgtcgtcgcgcggccgttcccctgcacccgggagttgaaacgataacccgcattgtgagccgcagcgatgtagctgttggccgtacccgcagcgctgaggttcgttgcagagaggtagcccggcatcacggctcgtttttcggtggctgtgaacgtaatgcttcgggccgtgccgagcagcacgttctggcccccggtctgatcgtaccagcctcggaagagcggcagctcgtagttgacgcgcagcgtgcagcggctgcccgcaggtacgatgaacgactcctcgtcctgatccacttcgtatggagcgtcgcattccagacttaccttgtagatgtccgtgataatatggatcttggaggcctcgaaatacgggtaaatccacgttcggtatgtttcgggaacgaaggaatacgtttcggttccgcaaagcagttcgctatgcccttcgtcggcataccatcccgcaaagcggtagcccgcagcggctttcgccgtgagggtgcacccctgctcgtagcaggcggcacgcagtgttccgccggtaggcttttccacatgcagtgccctggccgccgttaccgtcccgccggtgggtggcgcgacgtagagcgcattggcgaagcggtgttcgaagcggcggcggctctcgtatccgtagctgtcgcgcacgcgcacctcataggcgagctgtgcatgagccgccgtaacaaggggctctggatagtagatgacttcgtagtaattcgatccctgctggtgattgatcggaaggtcaaggcgggaagcgcactcctcgtaatcgacgaggagggtcccgtcggtcggggtcagcagctccaacgcgcccgtgagtgtcggctcgctctccgcacgttcgatattcacgtaaagcgaagcgttgaacggaagcacgcaataactgccgatgcggttgctctcgaaatcgtcggtcacgctcaacgtatagccgtgtacgcgggtgtccacctcattgtcgcccgaaatcgtgatgtcgagcgtatgggacgtattacgccctacgttgaagtccgtcgtgttattccgtcccagatatacccgataatagagagtcctgttgccgcgcgcggcacggatcatcaggtacgaagcgcacgcaggagcgttgtcggcgtttttatcccgctggtccgtaatcgaggataccgtgccctgcgggttctcgaagaggtattgcacgcccgaacagctgcgccgcgcagcgtcgggaagctccacgagcggagcatcggtgaaatccttctccgaggtcgaaggggcactcgcaggcgtgaagagcgtcgtatattcggggacggaacacaggcgtacggagcgcagttcgaggtcggggaccttatccgctacgcggatgttgtaggcgatcttggccacggtgcgccgcacgctcaatgtaggaagcgtaacggtccctttatcgggcgcgatcgcaacggtcatgacggccgacatgggaagcgtcgcatactcctcctgccacttgatcgtgtaggtacgaagctgttgtacactccgctcgcccaggtccgcacccaggttggcagcgacgtagagatcgtactccccgggcaggcactcgaaccgtaccagtgccgaacgggagtaaaaatgcaggctttggccgttgctgcggccgaacaggtagaggttgatgtcgcggatcgcctcctcgtccgtcgcgcgggtcgcaaggcgaagcatatcttcggtcgtaatacgcagttcggccgtgaccggacgttccgaggctgcgctatcgaccggcatagtcacttcccggctgcacgagcacagcagcagataaaaaagcggaagagagattgttctgaacataggaatcggtttttttagaacagtctgccgcccttgcgggcgacagactgtcgggaaaaggtttctcaggctcccagatcgatctgctgcgttaccggagactcccagtcggcgaccgtgatcgtaaggcccacctccgagcctgccagacccgtgatcgcagcttcgatgcggtagtagccgttacgcacgatcgctccgcctgccttgcccgtgacaggtaccgtatagacgatttccgtacggtcggaggtcgtcgaggtgctgccgtcggcgtcgtagctcgccgtgatctccaactgtacacggttgccctcggcaagagcgccgttttcgaagacgtagaacaggttgtcgtatctgcccgctgcggcggtggcggtctgcgtatgggtatagctcatcgcgccgggcgaaggagttgcgggcgcgatgacaggcgactggctcgccgctttcgagagcttgacgcccgtgacggtgatcgttcccgaatatttctccgcgaaggccgcatcgatcgtggtctgcacggagagcttggccaccgtacggcggagcgccatcgcaacgtcggtcgtcgaaccctcggcgatggatttgctcgcagaggccgacatcacgaagccgcccgcacgcttggccttggtcgagacctccgcgaaggtgccgttatagtccgcagcggaggcttcgaccttcgagagcaaggccgatttggtcgtaacacccgtgagcgaaaggttcgcaacggcgtagaagtcgcacgtcgtacccgccgccgaatgcggcagcgcgaaggtcgccgacttgtcgacgagttcctcggaggtgaacgaacgctgcgcaacgaggttgccttgggagttgaaaacgtaaaccgtcagcgacgtgaggctcttctcccacgtttcggcggcggcagtcgagttcagggatgcacgcgaggccggggcatcggtaaatgtgaggcacacggcagcgccgtccagcggctcaccgttcgtaccgtaagtcacggtctcctccttcgagcaggagaccagcgcaagggcggccaaagccgcgacaaatgtttttttcatatatggaataaaggattaaagggtcgttatttatttcggttcgtttttctcggctcgccgtcccgtatcttccgcgtgcgtacacggtggcggagcttggcttcatagcccggagggccgttgtcgtcgatccactgccggatgccgaggcgcagctcggctttcagctgccggaactcgggacgcgaggcgaagtcgtcgcccaaagcatagccggcgaagatcggctcgcagggcgtcagcaaagcccgggcgacggtgcggcgctgatcttccggaatgtcggggaaatcgttcgcgaggatcaggtcgatcgtatcgaacttcgagaacagcagacctcggaaaagactccggtcagcaaggcgaagcgcacactcggcactgccgcccgcgtcacaagtacgacggtagaggtcggcggccacggcgctgcgacgatccagaagttgtgcgcggtactggagctggggatggcgttcgcgaaggtaataatccagtcttgtccggaaccacggctcggaatatatctccatagcggtatgctatcgtttccgaccccgcccctgctgcgactcatcggcgccctgcgaggcctgatgggatgcttcggccgcctcgctgcgctcctgacgcgacagaaagcggctgtaagtacggttgtcgcgcgggttcacatacagaaccttgttcttcatcggctctccgaacgaatccttgacctgatccgccgagacctggccgccggcaagcagcgtcttcacatcggcatccgaaagctggtcacgaaggtacttagggacgtacggcttgtcgtaaaccgggtcgctgatcgtatagcggccccgatagacgtcgtagttcaggatgcccttgtaggtgttctccgtatcgccgtaggccgtgcatccttccagcgggatcgagccgccgctgcgaaggattttttgtcccgcatcgtcgatgcgacgtccctcggcgaactccgggatcttgacatcgcggtgcggaaccgccacaaggcggttcgtcgaagggttgaaggccacgtggcagcgctcagcttcccccgtgatgctgttatggaccgtgacaaggtgttgcagcgtcttgccgcgagccagaagtgccttgtcgtcgggcgtgatctccgaggcatactcctcgcgttcgtattcgggctgcacaagcggcgtatcgaggcggaacttcaactcatcgttatgatcccggtagaaactcaggttgaaaagacccgtcgtcgtgccgtggtccgaaagctggaccgtcgcaggaaacagctctctggtcgggagccccagcatcaggctccgctgcgtgcgctgcggcagcgcatcgaagtcgatgcccaattcttgcaactccgcgcgtggaatctcaaccttgtcgtatttcacctgttccagttcggccgtgttcacgacgtacttgttatacgtttcccagccctcctcgctcttcggattgctgacgagcttgcccagcgatgtaacgatcttgccgacggaaaggacgggcactttcaaaaactggaactggatcggattgtccttctgggatttgaaacctcggatgaaagccgctacggcattgctgctccggaacggatagaacgccggacggttcttcgcaagaggctgcacggtatgcacctctcggcgatcccctttggtcaccagcttggaaacggcctctacctggccgctgtccggattgcgcacgagaagcgtttcccggtagtcgttttcctgttcctgaccctcggtcggatttacattttcttctgttgccataatactgtcttttagttaataatgtgtgatttgtacttcgacagcggcaaatatagaggcccggaagacgatcccgacggatggcacgtcagggccgttctgggcgtgaagaaagacgaaaatagcccgtaaaataaaaaacgcaacaatttaactgagattccaaatagaatcgttcaaacgatccaatctaaacaagatacgaaaatctgaaacctgcttttcgatgcttcttgtgaaaactgtaacttttgtgccttgctgtgctaactatattgtcatttcaaactttagaataaaattcgcgaatgggcatatgggcattcaacctaaatatatcaagtcatttttgtgttcatcgagttaaattcgtatatttgacaacctatttaatcaaagccggtatgaaaatagagaaaataaaaattgagaactataaggtatatcgaaatacagagattcgaaatttatccaatttctctgttttcctgggggcgaacggtgctgggaaatcaacgctcttcgacgtattcggttttttaagcgatgcattgaaggcgaacgtaaaaaccgcacttaacaaaagaggcggctacagggaagtatattcgcgtgacggagaggggcctatactttttgaaataaaattccgtaacgataagatcgaaggagaaacacagcctctaattacttatcgcttggaaatcggatttgagaatggattgcctattatcactactgaaatcctgagttatcggcgcggcggatatggacgtccgtatcgtttccttgattttcatcggggcgagggaacggccattattaatgaagatgagtattcttcttcctcatcatccacttttcaggaccgtcgggaacagcaaaccctcgactctcccgacatcttggcgataaagggattgggccaatttcagaaattcaaagcaatcagctcttttcgcagattgttggacgattggtatgtgtcgaattttcagatacaggaagcccgtaatgtagaagatgtcggcttcagcgaacatctttctacgagcggaaataatctggcacaagtcacccgctatatctgggaaaatcaccggaacgtattcaataccattttggagaaattcagaaaacgtgttccaggtgtcgagaatgtcattgcggaagagacgcaggatggtcgtattgttcttaaattcaaggataattctttccaagatccttttgtcgcgcgtttcgtatccgatggtacgattaaaatgttcgcttatttggtattgctgaatgaccctgtaaaacatcctctgttgtgcgtggaagaacctgagaactatctgcatcccgaactgttgcccgaattagcggaagaattcagagaatacgccgacaagggcgggcaggttttcatctcgactcattcgcccgacttcgtcaatgccctgcaacccgatgaactgttctggcttcagaaaagcaatggcgccacaaccattcggaaagcatccgaagatgcgaccatcaaggccttatatgccaatggcgataaattgggatggctctggagagaaggttatttgaaaggaagcggaccgtactaatcgaggaaagcatggaccgtttggaatttcttgtcgaagaaaggtcgatggcagaagtgttgaaagtgcttttgcctcggatattaccggcatcttgggtgttggatgagaattatttcatccgtccacatgagggaaaatcggatttgaaacgttccattcccaagaaactgaaaggattcgcccaacataaagaacagaccaccggttttattatcatccaggatcaagacagtaatgactgccgacaactgaaacaagaactcgtagcgctatgcaaggcaaaccaggcaccgaatattaagtttctcgttcgtatcgtctgtcatgagttggaggcttggtatttaggggatatgaaggctattcaggccgtgtttcccagattcaaccctgcgagacatctcaaaaaatctctgtttcgtttgccagatacctgccaaaatcccaaaacaaggcttaaggatattgtaggcgactatcagcaaattgcaacggcacaaatgattgctccttacatcgacattgagcataaccgttctgaaagtttccggcaattcgtatcgggaatacgaaaattcatcacggcaaaaaggtaatgtaatttttagctatttctttgccaacagatgtcgcagtgcaggatcttcggcgatgcgtctgagttcccgttttatgatttgcgtgacgtcctccttgatctgcgtataattgcgtcggatgatctcctccatacgatccacgccgtcggcatcgcggaacgaggatatttccgggatcggaacgtacgacgccgtctctccggcgagcttctccctgtcgatgacgatctcggcgtggaagatcttctgctcgatgcgttcgtcgaagttgtccgccacggcacccacgaacataccttgcgagaggttggagatcttcgaggcgggaatcaggctgtcgagctgcgtattggtcgaggtggtgaggttgtcgttgctcagcgagttggaggtccgcagctgcacgatcctgccgaagcgctcgctcaacgtcttggccgtatctcccaaaacctgacctgcgaagatgttgcccacggtattctcgatgaccttggcttcctcctggccgtagtcgcgttcgagctgcgagaagtcctgaaagctcaggcatacggccaccttgttcgagcgggccgtggcgatcaggttgtctaacccccggaaatagatcgtgggcagctcgtcgatgatgatcgacgacttgagttttcctttcttgttgatgagccgcacgatacgcgaattatagaggcccagcgctgccgagtagatgttctgccggtcgggattgttgcccacgcacagaatcttcggatcttcggggttgttgatgtccagcgtaaagtcgttgcccgtcatcacccagtagagctgcggggagatcatgcgcgagaggggtatcttggccgaagcgatctgcccctgcagctggtcctgcgccccgcctttccacgcatccataaagggcgacaggtaattttccagttcgggataggaggtcaggatcgtgaagatgtcctcgtagcgtttgcacaacaattcgatggcgtggggaaaggtgcagtacttccctccttcgtagattttcaggtaccagataatcgcagccagcaggatgatcggagaatcgacgaagaagtcgccctgcttctgtatccacgtcttattgaggttgagcatgatcgtataggccgattcgtaggcgtccgagatgtcggtcataaactccggagcgatgggattgcagcggttcgaacgacggggatcgtcgaaattgatgatgcagaatttcggtcgggtttcgtaggcgtccaggtgattcaaaaggtggttgtaagcgatcgaggacaagtcgtcgaatttgaagtcgtagaggtacatggcgaagcccttctcgatctgctggcggatgaagctgttcaccacggtgtaggacttgccggaaccgggcgtgccgagtactattgtcgcacgaaaggggttcaccgcattgatccagccttcgtgccatgtcttgccgtagtagtaacgcgaacggaggttgaccgaatattcgttctcgatcaggcgtgtttcctgcatgaaactttcgttttcgtcgttgaacgggtcctcgcgcagccgttccttgaccagacgtccgagccatagacccgccagaaacagcaagaggaagcctatgcttgtagctgcgacatagagcggtgccgcccattgcggcggcaggtgccgcagcggatccccgaagaagaaaagcagcaggcccgccgcagctgcgagaagaatctgccggtgcgtgatgcgctcggagcgcacgctgcgcgtaccccagcagctcagagccagaaatcccgcagcgaagagtttggtcagatacaagtaagtgaaaagccccgtcgtacgctggacgttccgcagcagacggtccaatacgccgagcgtgcagccgtgcatatcgaaccatccgtagcagaaccaatagaagtggagcagcaggaacaaaacgcttatgccccgcatgagctgcatgactttttccaatcctctcaggtcatcttcctgttgcatgatatacggtttttgcaacgaagataccttcgcttccgggctgctcgtgtgtatgtccgttccgggcacatccaggccggttgttttgcaaaattcatattatacggcgtgtaattcgaaaaaatcacacgccgcgtatcactatcgttggcttcgttcgacgagagcctgtttcaatgcatccagaaatttggtcacgttgactttccgattaagcgcggcattgcggcagcggtcgggattcttgaacgaaacattcagcagcagttcgaaagtgcggacgagcttgttcaattcggcaggcgtaccgtctgccttgcggatcgcacccgacgcatggagcgccgagatcagctccatcaggtcggtcagggtgtactctgcggaccaatagtacggcgagcggatatgcttgctctgccgagtcgccagagcaggataacgcaactgcaccagcaggattcgtcgttcgatctctacgtgtgcgatgatcgtttcgaaatatccctttttgatcggctcttcggcgtatcgatacttcatacgttccagataaccgcacaaatgcgccaacaagcgcagctggtcgatcacgggtcgttttcttaacagtcgggaaatacgttccacgaaatgttcgatggcggtttccagacgtgtggaaatttcatcggacgaaaatgcttcgccgcagagcgagaacagccggaaaagttcgcactccgaaataatcttggtagctttcataatacaaaattttgaatgggttaataaaaagcgcgggaaaggcccgcgctccgagagatagctattcgatctgcgcgaaactctccgccataggagaaaaagcctcgcggaatattcgttttctccgtttttatacccctttcatctttgtgcgatgccttaccgaatttactgaatatttgcgaacgactccatccctcaccgcttcgcacggcgtttcttacgtcgccggcgctcgcgcgggatcggctcctcgtactcctcctgtcggccggccgcgagcagatcgaacaactcttccaggcccatgccgtcgacggccgtacttctgcgggtatctccccgctcctgcgccgggggatattcgcgccttcgttccggctgcccgccctgcgggatctcttgcgtctgttcctggacctcctcagcctcctgcatccgttgctcggcttggccagcgtcgaaatgcgccgccagaccgtttgccgcgaactcccgtcccaggcgcgaaccgttgaccgcgacacccgcacggtgatcgatgaacgtcgtaccgtagatacgtcctgcgtcggtgcggcgcagcacgaccgtgatcccttccgcttccaacagacggcagaactcctccggggaacgggcagcacccagcacccgcacgacggtctgacgcgtaccgtcgagcgccgcactgtcccgcagtgcctccctgctgcgggcgtagtaccgttcgagggcccggtgtcctacgtcgcgtcctatacggctcgacttgatcggtacaccctgtggcatggcgtcgtcatcgagcgcaccgtagagaataccggcatactcgtgtccgtgtgccgtaccccggcactcttcgatggagacgttgaaatattcgagcagcgtccgcagctccccgaaggaggtgcagcggtaacggtgcagtgtcgagcgcacgagcgatgcgatttgtcgtttgaggtcgcttttcgtatagtcgagtttcgacagcgtgtcgtacgtctgcttcgcgtcaccctcggcggcagggcgcagtccgtagcgtcgttccagagcatcgaggatctcccgcgaccgtcgagcctcgaagtcgtgcgccagcttgcggccgtcgagccccacgcgcagcgacacgatatggatatgccggcgttcgatgtcctcgtgcagaaaaacgaaacagggctgtgcgccgtaacccatacgctccatatactcgcgtgcgatctgccgcagctcgtcattcgtgagacggtcttcgggagcgggattcagggaggcgtgaaacacgggattcttcgtgcggcggttggcttcgaggtacggttcgaaacaacgcagcgcctcgcggatatcgaaatatcgctcgtccgtgacctgcatcggggtattgaacgccgccagaaaacggccctcgccccggtcaatcttatccttgttgtaataaagagctcccgccggtgtagccccggaggttatccgcgcgaccatagctcgtaaagttcgcggctgagcgcgatgacctgctcggaaagggctttcagctcgcgcgtgcggcgctccagaaggagcacttgtcgcggaatagccgtgtgcgaaaagtgcgtgttgacggcccgcacgatctggttgtagttgttgcccacgcgctgtatctgctcgtaaaactggttcagacgggtcacatatcggcccaaggtcgggtcgatacgcaccacgcgaaactcttcggcgaagattcttttgacgataaaccggctgcggttgtgttccagtccggcctccgcaagcatccggcagaaacggatattctgctgctcatcgagtcggaacgagtacttgtaactggcttttctctctttgtgctgttcttccatatgtcaaggtttaagagggcgcgactcgggagcggcacccggcctcgcagagcaaggacctttgtcggacaaacaccggtttgtcggacaaaggtacaccttgctaccgtccggcgacggtaattgcgtcgagacgacgcagggtacgaccgatggttcgaacccctcggctcgcggtgcttcccgggctgcaatattacaacgcttttcgcctgataacaagtcgtttgatcggcctggaacggcctccatgcgacatacgtcgaaagcctccggagggatactatcttcgctccgcgagatgaatgacagcacctcctgctatcatgcgatgacagctgtctgtcacggatgtactgctatcgatgaaatattgcaatcatggatatacatccatcatagacgtactgctatcgatgaagtactgctatcatagacgtatatccgtcatagatgtactgcaatcatggatataccggaaacaaatgttcaaaccctgttttgcctatggataaacaacccgtattcttctgcgtctgctcacaaaagggcggtgtaggaaaatcgaccttcacgattctgctcgcaagctggctgcactatgctctggggcgcgatgtgctggtcgtggactgcgatgctccgcaatggagcatcgtcgcgcagcgcgaacgtgagctcgatgtactcgaacgcaacgaccgctacaaactcatgatggtgagactgttcaaacgtacgggccgcaagatctggcctgtggtgcgctccacacccgaagaggggctgcaagccgcccatgcgtaccttgccgccggcgaccgcgaagccgacttcgtgctgctcgatctgccgggcacggtcgccgcacccggtatcttccgcctgctcgcccggctggatcatctgttcattcccttgaaagccgacaagctggtcttggagagtgccctttcctttgcgcgggccgtcgatgaacaactcgtacataacgacgcactccggctgacagggctgcacctgttctggacgatggtggaccgtcgggaacgcacaccgctttatgaaagctacggaaaagcatttgcagcgttccgtcttcccgtgttgcagacacaggtgccgtaccgcagccgtttcagcaaggagattctcgacacgagcggtgccgtcggacgttccacgctctttcctgccgaccgcgctttcgccgccgatgccgcgctcgacgcgctggccgcagaaattctgtctcttatggaatagcgtatggtcagacgcaatgacccgacaatcgacgaagaggcgctgcggcaggctatcggccgtcagtcgtcgcacggctccgtgctccgcactcgggaagatccgacgacagacgatgaaccggctccgccaccggaagccgctgcatccgaagcgtgcgagccgcgccgtcggcgcctgcgtatgcctgattacgagcaaaccttcctgtgtgtaagtgacgtgcaacgacgtgccggaatttacgcttcggaagagaccaaacgcaaactgctcgacgtcgtgcagctgctcggacggggcaacctctcgctgacggcctacgtggacaacatcctgcgccatcacctcgaattttaccgcgaagagatcaaccgcctgcacaaacaacgaaattcccaaaacattctctaaatctataatcttatgtatgcaacctattatctgattccgggcagttgtgcattggcgtgcctgctcgtcatactcctgctgcgacacaaatcttcgtcgctgcgtcccgcagccaggtatcccgccgcgccgacgatacacaaggactgccggcatattgaaaagaaatcctcttcatataactatgtacagcgcttcttgcgctcacgggtgctgctgcaacaccgccacgcagtctacatcgatacggacgtacacgacacgctgtggcgcgtggtacgcgcgtgcggtgtgcgaaacatcacgctgagcagctacgtcgatgctatcgtgcgcgaacatctggaacgctaccgtacacagatcgaggccctgcacgctcctgccgacgaaaactcccgcacgcgatgttcatcgtaacgctgctcgaagcgtgcctcaccttcgttcggcgcaggtgtttccgtgcgctctacggggcaggtgtcggaaaatcccggcgccggccccgtgctccggctcccgacacggctccgcagacaacgcccacgccggcgttgccggtcatcatccataaacactatgtgatcggccctgaaacgcctggagatgccacgccccgaccgccggaacaatccggtgcgcagcgtactatctttgccgccccgcagtcggaaactctctccgcctgggagcggcttgctgacgacgacgaacccttcgacgacggagagccgctggacgacctgccggacgatgtgaccgagcaggaacgcgccgagatcgaacgcttcgatctgaaccgctaccgataaacttgtgtcgaaccccgagcaacgaatccatgaaccgtatccgcaacccgtgcggcccgcatttcatccgtacgacattcatacatcattcaacccaaaatcagacaaaacatgagaaaaaaatcgttatcgacggccctgctcgcactgctcacggcgagcgcctacgcacagggcggcgacggcatcgccggcattaccgaggccacaagtatggtcacgtcctatttctacccgctcgtgcagctcatctacgccatcggcgccgtgacgggactcatcggcgggatacgtgtgtaccagaagttttcgtcgggcgaccccgatacgtcgaagaccgcagccagttggttcggcgcctgcatcttcctgattctcgtgggaaccgtcctcgaatcgttcttcttctgatggagtacggcatgaacaaaggcgtgggccgcagcgtggagttccggggtctcacgtcgcaatatctcttcctcttcgccgccgggatgctcgcgtcgctgctgctgacgatggtactctacatggcgggagccgaccgcacgctctgcattctcgtggcgctggtctgcatgtcgctcgtggtctgggggacgttccgcatgaaccgccgctacggccctcacgggctgatgaaacgcctggcggcgcggcggcatccgcgccgcatcatccaccgccggagcatccggcatctgatcgttaaacgaaactaaactatgcgaggaacactgaaaacggctgcactggaacattacttcccgctgctggccgtagaacacgattgcatcctgtcgaagaacgccgaggtaacggtggcctaccgtgtcgtgctgcccgagctcttcacgctcacgggcgccgaatacgaggccctgcacggcgcctggctcaaagccctgcgtgtgctgcccgactacacgatcgtacataaacaggactatttcaccgaggagcactaccgccccgacctcgcctcggacgagagctttctgggccgggccttcgagcgtcacttcaacgagcgacccttcctgcggcactcgtgctatctcttcatcacgaagacctcgaaggaacagatgcggcgccgcagcgacttctcgtccctctgccggggtttcatcgtgccccaggagatccgggacacggagtccgtaacactgtttctggatgctgcggagcagatgcgccgcatcctctgcgatgcaggcttcatacgtctggaacctcttacggccgatgagatcgtcggcaccgcagacgacagcggacttatagcccgctacttcgcactgggcaccgagggcatcgtcaccaacgaggacctgcggctcgacgacggacagatacgcatcgggaatcgcagccttgccatgtacacgctttcggacctggactacgtgccgcaggccgtcggcacggacagccgctatgaacggttctcgacggatcgctccgactgccgcctctcgttcgctgcacctgcggggctgctgctcggacatccgcacatctacaaccaatacgtttttctggacaaccacgccgagacgctcaaaagcctcgaagcgagagcccgcaacatgaactctctggcgcggtactcgcgtgccaactccgtgaataaggagtggatcgacctctacctgaacgaagcccacaccgaagggtaccgctccgtgcgctgccactgcaacgtccttatatgggccgacagcgaaacggcgctcaagggcatctgcaacgacgtgggctcgcagctcgcgctcatgggctgcacgcctcaccgcaatacggtcgatgtgccggcgctcttctgggccggcataccgggtgccgagggagagtttcccgctgaggagtcgtttccgacattcctcgaacaggccctctgcttcttcgctgaagagacggcctaccgttcttcgccgtcgcccttcggcatcaaactcgtcgatcgtctgagcggcataccgctccacctcgacatctccgatgagccgatcaagcgcggcatcacgaccaaccgcaacaaattcgtgctgggaccttcgggcagcggcaagtcgttcttcatgaaccacctgatccgccactattacgagcagggggcgcacgtgctgcttatcgacacgggaaattcgtataaaggattgtgcgaactcatccatcgccgcacacggggcgaggacggtatttacctgaattacacggacgaagcaccgatctgtttcaaccccttctacgtcgaggacggggtgtacgacgtcgagaagcgggagtcgatcaagacgctgatcctcacgctgtggaaacgcgaggacgaggccccgacacgctcggaggaggtggcgctgtcgaacgccgtaaacctctaccttaccaagatcaagagcgatcccgccgtcgtaccttcgttcgacaccttctacgagttcgtcgccaccgactaccgacggctgctgcaacaaaagaaggttcgtgagaaggatttcgattgggcgaacttcctgaacgtcctcgaaccgttctaccggggcggcgagtacgactacctgctcaactcgaaccgtcagatggatctgctgcacaagcggttcatcgtcttcgagctggataacatctccgaaaaccgcacgctgctgcccgtggtgacgatcatcattatggaaaccttcctcgccaagatgcggcggctgcaaggcgtgcgcaaggtcctgctgctggaagaagcgtggaaagccatcgccaaggagggaatggcatcctatgtgaggtatctcttcaaaaccgtccgcaagtacttcggcgaggcgatcgtcgtcacgcaggaggtcgaggacatcatctcgtcgcccattgtcaaagagtcgatcatcaacaacgccgactgcaagatactcctcgaccagcggaagtacatgaacaagtttgatgccatacaatccctgttgggtctgacggagaaggagaagtcgcagatactctccatcaacatggcaaacaacccgtcaaggctctacaaagaggtatggattgggctgggcggcacgcagtcggcggtctatgccaccgaagttagtgctgaagagtatctggtgcgcccgtaaggggatttgacaaatgtcgctgtggcaagcgactgggcgtgagtttataggcccattaacaaccgacttatctgaaagggaaaccggacagggagtgcagcatgtcggtaaagccataagtcagccaactatcaggctgcgactgaatggcaagttaaaacgatagatataaggataaagcctgcattggttgaacgatagtccgagcagtcgtatccttgggcggtgacggaagatagttatatacgtcacactgcggtactacactgatgagagatagcaggcgtagcatgaactgaccgcagggcaactgccataagcagtaaaggacgaaagtcgtatccgacaatctatcgcgccaaacagttgtcaagttcctaaacggggattgcctaaaccggaacgccgcaaggctattaggtgtagacctatgaatatccggcatggcaacggagttcccatagtagtccgagcagggtaacgccctgtacatggcgaaggggaacagctaattaagtttaacaatttaacggaaaatgtgtgagacatgagaaatccaaagaatgtgttaaacagtctgtctaaacacagcggtaattcaaactacaagtttgagcggctgtatagagtgctgtttaatgcggaaatgttttatgtggcctacgagcgcatttacgcaaaaccgggcaacatgacagcaggaactgacggtaaaaccgtcagtggaatgagcattgaacgcattgagcaactgattgaaagtctgaaaaacgagacttatcaaccagctccgtccaaaagggcgtacataccgaagaaaaacggcaagaaacgtccgcttggcatcccctcattcaacgacaagttggtgcaggaagtggtgagaatgatactggaagctatctacgagggcagttttgagcatacctcacacgggtttcggcccgggcgtagttgccataccgcacttatcagcatacagaagtcattcacagccgtgaaatggttcatcgagggcgacatcaaagggttctacgacaacatcgatcatgatgtgttgataggcatcctgcgggaacgcatcgccgacgagagatttctacggcttatccgcaaattccttaacgccggatacatcgaagattgggtgtttcacagaacgtacagcgggacaccgcagggcggtatcgtcagtcctatattggcgaatatctacctcgacaagttcgacaagtacatccgggaatacatcaatcggttcaacaagggggaaatacggaaaggcaacgctcagtacaagctctacgagcagcggagataccggctggctaagaaactgaaaaatgagaaagatgaaaaggtaagagaacagatggccgctgaaatcaagcggcttcgggaagaaaggaacaagttccccgcgcgtaatgaaatggacagcagtatcaaacgattgaaatatgtgcggtatgctgacgattttctgattggggttattggtagtctggaagactgcaaaacagtaaaagaggacattaagaactatttgaaagaggctcttaaactggaactgtcagatgagaagactctgataaccaacgcacagaaacccgccaagttcctcggattcgacatttttatccgtaggagcaacgatttacgcaaggatattaacggcaaaacaatccgttcgctcggacacgttccggtactgtatctgaattacgaaacgatgcgaaagaaactctttgactataaagctgcgagaatagcggttgaaaacggtaaagagatatggaaatccatcgtcagaacgtacatgatcgatttggatgacttggaaatagtcagccagttcaacgccgagatccggggattttacaactactactcgatagccaataacagtccggccatcaactctttctatcacatcatgtcatacagcatgtacaagactttcgcaagaaagtacaagtcgtctgtaaagaaaatcctattccagtacaaaaaggacgggacgttcaaagtggcatatgagaacagtaagggtaaaacgctctaccaatcattctatcacgacggtttcaaacgcaaaaaaatcgcaggggctacctcatgcgacactatcccgcggacagttacaataacgggcggtcgtaacagcctaatggaaaggctgaaactccaagtctgcgaattatgcggtgctacggacaaactcgaaatgcaccatgtccgcaaactcaaagacctgaaaggtaagtccgattgggagaagaacatgatcgcacggcggcgcaaaacgctggcggtctgctcgaaatgtcatgcaaagatagaccccgaccgacggatcagactgaattaattagtggagagccggatacagggagacttgtaagtccggttcgggggcgagtgcccggaaacctatcatagaaatatgacaaggcgctgggtacttagcctacacgtacacgactgaggaaagcgaaaaaatggaactgttcgctcttgccgagaagctggacggcaaccttgaactggctatcaagcggcttgcagaaagcaaaagaaatccccaatcatcaacaacttaaaaattaggaacatgaaatggattgacaatctgatatacacgctattgtccgcctgcctgctggcgggctgcgaggacagcggaagcaaggagctggaaaggatgcagggctattgggtacacgtcaggggacacccggctttcacactctcggaaacgggcggcagatacaccgtcacccggaaagcgaatgtcaggggcagaatactggaaacggcttacccggtaacagaacggaacggctgcctgttcatcgaaacgggcttccgcatacagttcacctatgacaaaaagaccgaccggataacgctcatgcccggcggcgaatacaaacgagttacaaaccctgaaaacaaaagataatgaaaagaacaattctccttatggcggtgtgcctttgcttcatcggcaaggcatccgcacagtgggtggtgtcagaccccggcaacttggcgcagggcatcatcaacaccaccaagcagatagtgcagacttccaccactgccaagaacacgctggacggcttcatggaagcgcagaagattttccagcagggtaaaaaatattacgatgcgctcaaagcggtacacgatgttgtcaagggcggcatcaaggtgaagaagtccattgagttggtggcggaaatatccgaaatctacgtgcgaaactatcagaacatgctggcagacccgaactacacgccggatgaactcaccgccatttcagccgggtacgcaaagctgctctccgaaagtgcggacgtgttgcaggacttgaagaatgtagtgaacgtgacgggcatgtcgctgacggatgccgaaagactggcggtaatcaacaacgcctataaaagcctgctcaactaccgcaacctcgtgaactactacacccgaaagaacatatccgtgtcctacctgcgggcgaagaagaagaacgacaccgaccgggtgctggctctctacggctcggcggatgaacgctactggtaacatataaatcggtatgcctatgttattagcagcggtggattttgacaacctgcaccaagtgttgcgggtgctgtacgatgaaatgatgcccttgtgcagcaacatgacgggggtagccaaagggatagccgggctgggagctttgttctatgtagccgccaaagtgtggcagtcgctcgcacgtgccgaacccatagacgtgtacccgctcctgcgtccctttgcgctggggctgtgcatcatgttttttccaactttcgtactggggactatcaacacggtattgtcgccagtggtgaaagggtgcaaccagcttatggaaacgcagactttcgacatgaacgagtaccgggcgcagaaagaccgactggaatatgaagccctgatgcgaagccccgaaacggcttacctcgcatcggacgaggaatttgaccgacaactggaagaactgggctggtcgccctccgacatggtgaccatgacgggcatgtacatggacaggacggcttataatataaagaagtccgtccgggactggttcagggagttattggaaatgctctttcaggcggcggggctgattatagacacgctgcgcacgttcttcctaatcgtgttaagcatactgggtccgctggcgtttgcgatttccgtctatgacggtttccaaagcacgctgacccggtggatttcacgctatatctccatttacctgtggctgcccgtgtcggacttgttcagcagcgtgctggcacgcatacaaaccctgatgctccaaaaagacatcgagcagctttcagacccggatttcatcccggacgggagcagcaccgtgtatataatctttatgattatcggcatcgtgggctacttcaccattccaacggtggcaagctggatagtgtcggctggcggtacgtctgcctataaccgcaacgtggcacgagctgggtcaatcgccggggctgcggtcggtgcggcaagcgggaaagtaaccgggaaactactcaaataaccaacatcaatatttagtatatggaatttaagtcattaacgaacatcgaaacgagtttccggcaaatccggctctttgcgctggtattcatctgcctgtgcgcactggtgacgggctttgccgtgtggaactcgtacagcttcgccgagaagcagcggcagaagatatacgtcctcgacaacggcaaaagcctgatgctggcactctcgcaggacatggcacagaacagacccgtggaagcgaagtcgcacgtgcggcgtttccacgaacttttcttcaccttatcacccgaaaagggggctatcgaaagcaacatcaaacgctcgttgtttctcgccgacaagaccgctttcaactattacaaggacttggcggaaaagggctactacaaccgggtgatttccggaaacgtcacgcagacggtggagattgacagcgtgaagtgcgacttcgaccagtacccctacaaggtgaacacgtatgcccgccagttgattgtccgggaaagcagcctgacggtgcgaagccttgtcacctcgtgccggttgcttaacgcaacacggagcgacaacaacccgcacggcttcatcatcgaagcgttcaccattaccgagaacaaggatttgcagaccattaaaagatagccttatggaaagaaaacgaaattacatcgaaaaggtgcaggactgggcagacgaccgcctgcgccgaatgtgcggacggattacgccgggcaaaaggctggcggttatcctcctgatgttcttctttttcggcggcttgtctatctacatcaccgtttcatcaatctacaatatcgggaaacgggacgggcaaaggctgcaaatagaacacatcagacaactgccgttgcacggcaatgacacaaccaaaagtatcaacccgttaaacagaccgcaatatggaagacgtacagaagaatgagaacggcacgaccgcacagcaggcggacgggaagccgaaaaaggaaaataagcccaaacgggaacttaccccgcagcaggtgcagcagcgcaggaaaatgatagtcttcccgctgatgttccttgcctttgcagggtgcatgtacctgatattcgcaccctccggcaaagaggacgtgaatgtggaaagcgtgggcggcttcaatgccgacatacccctgcccgcagaggacgggattatagccgacaagcaaaaggcttacgagcaggcggtgacaagccgcaaacagcaggacaagatacaatccttgcaggacttcggtttcacgctggatgatgatacggaagaaccacaagaggaaatcaacctgctgccggaagaagatccgaagccacaaaggggcggcggtgcttcttcaagggcggcttaccgggacatcaaccgccagttaagcacgttctacgaaacgccccctgtggacgaggaaaaagaggaattgaaacggcaggtggcggaactgaccgaccgactgaaacagcagcagaacgccacgcctacggctgacgaccaaatggcactcttggaaaagtcctacgagctggcggcaaagtatatgaacgggcaggacggacaaaggggacagattgcccaaataccgacagccgggcagaacggcggcggtatcggcactccggctattccggtgcaggctatccgggaaacgaccgtttcgggattgcagcagcccatgagcgatgccgacttcatccgggcttacagccagccacgaaactacggcttcaacacggcggtaggcacggggtacgctatgggaaagaacacggtagccgcctgcatacaccaagaccaaacgctggtggacgggcaggcggtgaaactccggttgctcgaacccatgcaggcgggaaatatcgttgtgccgaagaatacccttgtggcgggaacggcaaaggtgcagggcgaacggctcgacatactggtgtcctcgattgagtacgctggcaacatcatcccggtggaactcgccgtgttcgacacggacgggcaaaaggggctttccgtcccgtcctctatggagcaggaagcgttcaacgaagctatggcgaatatcggaagcgggctgggtacaagcatttcctttgcccaaagtgccgggcagcaggtggctatggacgtgacaaggggattgctgcaaggaacgtccggctacctcgccaagaagttccgaaccgtgaaagtgaagctgaaagcaggctataaagtcatgctgtatgccaaacaacaataaccattttatcaaccgttaaaatttcaattagcaatgaaacagatttttggattgttcgccctcttgctgggcgtgtgtgcggcaaacgcacaaaccgctgacaccgtgaagtatgcggctggcaacgacttgtaccgggggattacccggaaactcccgtaccgccaaatggttacgccctacggcgtggaagtgacctttgccaagacggtgcatatcatcttccccgccgccgtccgctatgtcgatttgggaagcaaccacatcatagcgggcaaggcggacggtgcggagaacgtaatcagggtgaaagccacgacagagggctttccgggagaaacgaacttctccgttatctgcgaggacggcagtttcttttcgttcaacgccaagtacgcccgtgaaccggaaatgctcaacatcgaaatgaaggacttcttggagaatgaagatacgtccgacttctcacatacccggatgaacatccatttccgggaactggcgggtgaaagcccgctattagtgaagctgataatgcagagcatctacaagaacaatgaccggaaagtgcgccacttgggtagcaagcgtttcggcatacagtttttacacctataacgggatgctctacgtgcacacgcagacaaagaacagttccaacgtgcctttcgacacggacttcatcaggtttaagataaccgataaaaaagtgcccaaacgcacggctattcaggaaacggtactggatgcggtacgcagctacaacgaggtgatagagattgccgggaaatcgaccgtgcgcacggtgtacgccctgccgaagtttaccattcctgacgacaagctgctggtcgtggaactctacgagaagaacggcgggcggcatcagaccatacgggtggaaaacgccgacatcgtgaacgcagaagtgattgacgaactaaaaatcaaatagggaatgaaaagacacatctttataatgatgctctttgcgctgtgcctgacctcgtttcaggcacacgcacaaagatacctgccgggcatgaaaggcttgcaggtcacggcgggcatgacggacggggtgcattggaacgctggcagtgatttcgcctaccacatcggggcggcgtacagcgtttacaccaagaacgccaaccgctgggtgattggcggcgaatacctgcacaagaagtatgactacaaggatatgcagatacccgtagaacagttcaccgcagagggcggctattacctgaaattcctatcggacagacgaaagacctttttcctttcattgggcttgtcggctctcgccgggtacgaaacaagcaaccgaagcgaaaagctgctgccggacggctctaccttgctggataaggactgcttcatttacggcggtgcgctgacgctggaactggaaacctacctgaccgaccgggtggctctgctgttgaacgcaagggaacgggcgttgttcggctcggacataggcaagttccacacgcaggtatctttgggactgaaattcattatcaactgaccgctatataataatgtatatgaagaatgtaatgtataaaatcatcatgggctgctacatcgtggccgccctcgtgcttgtcaccgcctgtaatgacaacttggatattcagcaggcgtacccgttcagcgtcgaaacactgccagtacccaaaaggctgaaagtcggggaaaccgccgaaatacgctgccgactggtgcgtggcggctattaccagccgactgcctatcagatacggtatttccagccggacggcaaaggaaagctggaaatggataacggcacggtgcttttgctcaatgacctttacccgttggagaaagaaacattcaggctctactacacctcggcatcgacagaccagcagacgattgacatttatattatcgacagcttcgggcagatgcaacaactttcgttctcgtttaacaatgacagcagcgaggaagaataaatcttttggaattagtatgttgataaacacccagtgttttattgctgggtgtttattttgtgattacctttgttccttgtaaataacttataaaaaaataactgcacattatgagaataaaggatatttccgttgaaaattatcgaaacttaaattctgcaacaattacatttgacgaatcgtgcaattttattgttggagaaaataatttaggaaaatcaaatatattaaacctgttaaatatcattttcacacgaagaggatttgtttatgatgattttaatgatgcaaatttacctataacagttaatatacgaataaaactcacaaatgatgaaatagggcattttgaagacttgtttgatatagatgattacacctatatcaatattatctgtaaacaagtatcacctgatgataatatggaattttatcatttagaaacagaaacatacatatctccaacccttattaaatgcttaaactttatatactatgattccttgagaaatcccatttctgaaattaattttgacagcagtaaaggcgtagggcgttttttatcaagaatgattaaggattacgtatcgaatacagatataaatactaataatttagttgatattgaatttacaaatgatttattaactaatgtaaatactaaattagaaaaaataaaatcttttaaagaccacgcaattaaagctgttttggagggggatgtttcattgttattcccaaagttaatctctttacaagatgccagaggaggggcattgtcaaaatgtggatatggaattcaatttttattactagttactttatctattttgaataaacttcaaacaatttccgaccaacgtggagaaacaggggtatttgttaatgaggatacaggagaaaggtctatttctgttgtattaggacttgacgagccagagatacatttacatccttatatgcaacgttctcttattaaatatctcaataaagttatcaataatgaagattctgacttaaagttattaataaaagaattatttggaattgataaattagatggtcaaatcatcatcgcaacacattcaccaagtattattcttaatgattttaagcagattattcgactttataaagaaggaacaagcactaaaatagtttcaggaacaaatctatctctcggcgaacaacttgaaaaacatcttttacttcattttccttttatcaaagaagcattctttgctcgctgtgctatttttgtcgaaggggattctgaatatggaagttttcccttgtttgcaaaaaaatgtgatatagatttagatgattgcgggatatgtgttattcaagcaggtggagattccgttctacaactgatacagttagcagaaaaatttggtataccttgtattgggattagagatagtgatggagataataccccaacaagtattcctaatttatggaaaacaacagaacgggattttgaggctgaattaatgaaattgattgatataggaagagaggaagtattatgcgatatactttgtgaatatgattcggaaaaacaagaacgaattctgaatgcacaagcattaaataaacgagcatataaaaaatatggctatttaacagcacctatcagtacagacctcaaattatcagatatagacaaaacaaatatcacaaacctaaaagcctattattctacatggtttggaatcaataagtctcaaccattgggacttttaataggaatgaaactatctaaaagcgaaatccctcaaatatatgtcaatctaattgaacaagctaaaagtttatgctgatgtatcaaaacgaaatagaaattataaaatctcggattgagaacaaacaccaaggggatgaaaaacaattagaaattattttttctcctaacaaacgattattagttgaagcacctgctggctatggtaaaacacatacaatggtaagccggatagcctatttaatatctatcggcaagctacctgttccaaaaaaacttttagcattaacttttagcgtaaatgctgcatataaaattaaaaaagatgtaagtaagaatattccagaactattgcaggatttaggcaagcaaattaatattaaagaaaaaatatatgtatctaattatcatggtttctgtcgaagcatttaaaaaaaatacggtcatagactacatcctgcattgtcgaatttagatactctacaatccgttgatgatagtcgaagtgatagtataatgcgagtatttaataatatttcaatagatgaagcgaatgttttgtcagaattcaacgccggagttaaaaacataaaaggaaagtatttaaaagaaaatattgataaatataattctattgtcatctccaaactattaataaagaatgccattccatataatgcaattattactttaacaattaaattgtttaaagaacaaattggaatattagaattttaccgaaattattatacatcaattctcgtagatgaatttcaagataccaatctactaagttattggctattgaatttcttaattacagataaaacaaatatattgctattaggagattctttacagcgaatttatggatttataggagccgtacccaatttactttcacatgcacaaaatacattcaatttacaacttatttcattggagaagaattatcgttttgcatccaatgagaatatgcttcaattggataaaataatacggcaaaatgctattactccttttgataaccctaatagcttaaaatccaaggtggaatttaatatctatgataaccaagaagaagaagctttacaagttgtaattaagtcacaaaaaatattacaaaacgattcctttgctaaagttgccatacttgcaaagcaaagaggacctaatattgagcatattataaaaactttcaatcacaataagataccattcttttatggattatttacagatgaagactctgaatatataacattcaacagaaaatgtctgtatgaatttattgaattactaaaatcaaattcaaagattactaaaaagatagggaaaaaacatattgataaaatacgagaaatatatattaacaatgattccgtacttgttaaagctcttttagaattactcgaaattttttgggttcagctttttgtcgattattcgtttttatctaatgaagataaaattaatctgattaaagatacctttgaacataatggtataaaacaatatatggaattcttaaatacgtctataataatctctacggtacatgcagcaaaaggtttagaatgggattatgtaatacttcctgatatggaaaaagattcatttcctaactggtatggattatgcggtagatgtaaaaatggaaatgactgtaattttgtgatgactaaagatatagaaaaatcattctttgaggaattaagtgtattttatgtagcagttactcgggctaaaaagcaagttttttttacggcaagtcataaacaactcacaaataggggcatttttgaaaaaaattatagttgttttatgaaattgccaggtattgaatatatacaaacagtatagagagacagaaagtattattggctaaccaacagctagtcagaaggcattggttgctaataatttttggggaatataggcgggtttctttgctactttatttcccggcactcacgaaagaaagtagcggcggcaaacagccgccgttctctatcaactggttttaaggctccttatggacgtgtatttctctaaccacacctttacctgttccatgttgtattcgcccgtgataattgccgtatggtcgtttatggctacaaaccggacactctcgtggctgtttacccagccttgcagggaacagacgccccacgtgtccacatcttcaaaaacactgcggtctatccggctgattggctcgccgaaaactaccgtcattatctgaaagtccggcttatctgccagcagttgcaaatggtgcagcgtgccgaaatcgtcaattttgcgcccccacgcccacacatcattatacaaatcatcgccccattggtgcgggtggtcgaaacggacttttacctctatggtgtgttcgttttcttctgtgtcctcgataacgcccgttaccattaagcccgtaaaaatgcactcgcaacgcctgccgataagctccttgtttacttctgtcgttttcatgcccccaaaatttacttgtttattactccgttcttctttgctatccacccgtcacgcctgcggcggcactcgtccagcgttttggctaccgtgctgaaaagttcgccgtccgtgtggcggtagtcatattgaaaataaatctgtcccctgaaagcccctaaatggcatttcacgaacttttcttctcccggtgtctgggtgatgcttaccccgtttttgttaagtgactgcatgatgtcttatttttttatggttataaacttggttgtttttagcgggcagggctttgacaccccgcccggattggttgttatgccgcccggaacacaaagccgtcatcaaaccagtaatcgcacatgaacaggtcacgggcgaactgtttgtaatcgaaataggtctttgcgaactccggcaggtcgtaacattcttctataatttcataggcgaaatcttcttcatcgtcatattccccttgatattcatcccggaaatcccgtacaaggtcgtccgcatcttcctcgcccaaatcatggcttttatagttgcaccacacgaaaaaggcttcctgctcggtgtcgctcaaatcctccaccgcatcacgcagggcaaagaagttttcagaaatccagctttcgtcgattaagccctccggcacgttctcccagtcctgaaacatgtattccgcatcttcctcgtccttgtgaagttcccggcaggcttcataaaattcttccttgtccgaatagtccgaaaggtcgagccatgcgccggacaatgaaccgttgttgtacttgacataagtgcctacataaacttttgcttccgataatacctttgcttccatattgctgtaattttttaagtttttaattttatgcggatttgagaggtgagggagttgaagtttcactgaacttttttcctgtttcccgtaaatccgactttttttttatgcgtcttccggtcgggtcggtcgttttcgtttcacataggcgtaaaagggtagtgtttagagtttgcaaggttttgggcaaaaaatacctcgcaaggcagggaagattttttcgccaaaccggaacggctcgaccttgcaaaatcgtgaagaacacgtaactacctttgcctattgaaatgattaaaacgactgtcccggctgggggactgcgtaagaggaagatttacagatagggaaaccggggaaaagtgcctgttctctttcatcttttagggaacactccatgcgggcgggaaaggcaagggtgttgtgagcttgcttgcaatacgcttgtgcgggtttccaacggctcttttcacggaatacagtcagccatgccacgcacggctggcgtttcggggaatgtgccagttggaaaaggatataaaaaatgcgggtagtcggtggactgcccgcaaggtggaagaatgtacttcattgggatatagtttgttaggcggaatttcgttaccgaaatcgttacctattcgtttttgtcacggttataggtaacgaaacctaccggacggcgttctttctgttgtttcgactggcttagaagctgggtaagggcttggtacagttcgttgaactgcgcatcggtgcttacctccagttcctcgatgcgccttgacagttcctcgtaaccgattgccatttggcgcatgaggacgaaagcccgcatgattgaaatgtttacttctatggctactttggagcggagaaccgaagaaagcatggctacgccctgctcggtgaaagccataggcatagcaacgccgaagttgtaatcagggggtatcacattttgtgatacccctatggataacagcaagttagcttcctcttgagtgagaacaaacataaaatcacttggaaaacgctcgatattgcgcttgaccgcctgcttcaaggctcgtgtttccacttggtagagttctgccaaatgataatcgagcatcacccggcaacctctgacctcaaaaatattgttttggataatctgcaaatccataatcgtatattttaggaaatttagcaatgttggaataatagtaaggactggtcacaaattgtgaccagttcccaataatcaagattacatggcgacttccttgtaaatcttctcgatgccgacaaacttcttgtcaagcccctgcatatcgctgcctatcttgctgttggtgatgcgggcgtaaatttgcgtagtttctatgtttgtgtgtcccagcatcttggacaccgtttcaatgggtacgccctttgacagcgtggtggtcgtggcgaacgtgtgccgggcaaggtggaatgtcaggttctttttaataccgcatatatcggcaatctctttcaagtaggcgtttagcttctgattgctgattacgggaagtatcttcccgtccggcaacttgcccttgtacttcttcaaaatcatcttgggaatatccagcaggggaacattcacgtccgtattcgtcttttgccgcttggtgattatccaaaggttgccgtcaaaggacttttgaatattctcctgccgcaagttggcgacatcgctgtaagccaaaccgcagaaacaggaaaagacgaacaagtccctgacgtgttccagccgttcggaaaccattttctttttaaggatgatttttatctcgtcctctgtcagataacccctgtccactttttccagccgaattttatagctggcgaacgggtcgcccaccagtatgccgttgttgcgggcaataatgatgatacgcttgaagaactgcatgaacttggcggtggtgttgtagccgcacttgcaggcggtacgcaaatacaactcaaaatcggtaatgaacatcgggcttatctcctttatggatatgtccgatacgttgtacttgctttggataaattcagcgaggtggcggcgggtcacttcatacttgcggtaggtcgctatcgtcttggatatgcccacaagctgcttcacatcgtcattgtgcttttggaacaatgaaaggattgtttcgtggctctcgctatgacctaaaaactcgtttttcactttctcggcggtcacgtagttgtcacgccgctgcatttcgtggtaaatggtattcagggaagaacgtatgtcgtccaaaagggcgtttatcctcccggcatccctacctttggctttgcccgcagcaatgctccagttgtcgggctggatgctctgtttcgtactgaactggcaaagtttgccgtctatggtgatgcgtgccataatcataacctcgccgtttttcttttcagaacctttcttcaaataaaaaagaaccttgaatgtcgatttcataactcaaaatttttagttgcaaaattagtttttacctctcgttttcgagttatgcagactatggactaatatagtcattatcaggtcatttatggacaaatcgttaccgtttttgtccggcggggaataggtaacgatttagtaacgaaactttgtcttttaccgtacttttgaagtcttggaagcaggactttcgggcaataaaaaaagccacaaatcattgatttgtagctttttgtccgtttgctgaccatttctgtccagcacgttcagcggagagagagggattcgaacccccggagcctcgcagctcaacggttttcaagaccgccgcaatcgaccactctgccatctctccgagtgcaaaagtataacggattttcgattctgccaaatctttcctccgggtaattccaagtcccccgatcaaaaaaacgtcctgaaacaatgaaatctgatctcgaacaacggtattttactttcctgttattttcgaatcgaatccaattctgaccaattatatccattttagtccactttttaagaaattacgaacaaaatattttcctactcgactttgttttcgtacttttgctccgttttaagacaagcatttttgaaagcatggatgagaatcgctccgaaactcgtccgagcgcataaacttaccacagaaatcaatatatttttcaaattatcaactaaaactttgattatgaagcaactgctactaactatctcggccctgctgttcgcaacggcggtctgcgccgaaggctaccaagtcaataccttgagtgcaaaacagttgggaatgggacacgtgggaacaggtatgaaactcaattccgagtcgatctacttcaacccggcgggaaccgccttccaaacctcccgattctccttctcggtcggcatcacgggcatcaaatccaatgcaacgtacctgtcgaacaacgactaccggggcaatccgcagatccaagcccactcggacaacaagatttcgacgccgctctacgcctatttcaactacaaagccaccaaaaatctggccgtcggcctgggattttataccccttacggctcgtctatgaactggggcgacaactgggtcggagcacatctgatccaaagcatcgacctgcaagcctatacattgcagccgacgatctcctacaaattctgggataaactctcggtaggtgtcggcatgacgatcacctggggtacgttcgacctgtcgcgctccatgttccccgtcggcgaagcgacgaacaatacgatcgccggattgctgaccgccgcagggcagggacaatacgccgaactgttcacccaggcaggagatcgctccctggtatccgcccggatcaaaggcgacgccaaaactgcgatcggcgtaaacgtaggtatcctgtgggacatcaccccggaatggacccttggtttctcctatcgttcgaaagtgaagatgaaagtggcaagcggcacggccaacctcctgtatgcctctcccgaaatcgggcaggtcctccaggcaacgggaatgattcccgacttgagcagcgcttgcgtcgaaacggaactcccgctgccggccaacctcgcttggggcgtgggcttccgaccgaccccgaagtgggaaatggctttcgacatccaatacgtcctgtggagcgcctataaatcgctccacgtagatattaccgacccggcgaccggggcatcggtttacgatctgccgacgagcatcaagaactataagaacacggtggccacccgtatcggcgtccaataccacgcctgcaaattcgtcacggcacgcctgggtatgtacgtagatgaaagccccgtacggagcgatttcctcaaccccgaaaccccttcgatgaccaaagtatcctacacggccggcgtgacgatcaacccctgcaaaaacgtatcgatcgatctggcatacggatatatcacctcggcagacccggagcggacgggatcgtgcgactactacaattcactcacttacaaagcggtctatgcacagacatacgggcagctcatcgcaggcggaatggccccggagcaagcgaaaatccaggctcataccacggcaaacgacaaggcgatccagcctttttcgggcaactattccctgtcggcgcacactttcgctatcggagtgaacctgaaattctaaaaccgtcccgatttcccgtaaaaatcactatatttgcagtgcgtaccgggaaggtacgcactgtttctgtttatcgggatctccggcacgacacacgcttcccgaccgaaagccaacgattcctcccggccggaacgacttcgggaggaagccggatagttttacaaggctccatagttcaagggatagaacggaagtttcctaaacttcaaattcgcgttcgagtcgcggtggagctactatcttctcttcaggacgacctacccggtcgtcctgttcgcatattgctctccatataatccgatcgaaagccagctttcaacggcataccgccgattatatcgacatccgaaatagttgcgttcgatccgggttcttccattgcggccacaaaaacgaaccgaaacaattcggtgtcccggttattcgcccggcatagcttgaactgtgaagcgaccaaaaactccacaacgaagtccgccatcttccgcaagcaggtgacaaaaccccataaaaaacgggagcagactttccgtctgctcccgttcgattatgataaaaattatctattacttggcagcctgaatcgcctccagatcctccttcaatcctacgaccagattgtcgtactcccgcataccggtaccgccgggaatcaggtggccgcaaatcacgttctccttcaggttctccaacggatcgaccttgccctggatcgcagcttcgttcagcaccttggtcgtctcctggaaggaagcggccgaaatgaagctcgaagtctgcaatgcggcacgggtgataccctgcagaatctgcgtggaagtcgcaggaacgatatcacgcaccttgacgagattcaggtcacgacgcttgaggctcgaattctcgtcacgcaacttgcgcatcgagataatctgccccggctgtacggccgtagagtcgccggcatccgttacgaccaccttgtcataaagctcgtcgttcacgtccataaactcccatttatcgacgatctgatcctcgaagaagcgggtatcacccggatcttcgatcttgactttcgacatcatctggcgtacgatcacctcgaaatgcttgtcgttgatcttcacgccctgcatacggtacacctcctgcacctcattgacgatgtactcctgcaccttcgtcagacccaggatattgagaatatcgctcggggtaatggcaccgtccgaaagcgcaccgccggccttcacgtagtcgttctcctgaacgatgatctgacgcgacagcggcaccaggtaacggcgtacgtcaccttcttttgacgtgatgatgatctcacggttaccgcgcttgatcttgccgaaggtcacctcgccgtcgatctccgaaacgatggccggattggacgggttgcgggcctcgaacaactccgtaacacgcggcagaccaccggtgatatcgccgcccgacttgccgacggcacgcgggatcttgatcaggatatcgccggccttgatctttgcattgtccttgacaaccacgtgggccgacaccggcaagttgtaggatttgacctcttcgccctccttgttgatcaccttgatcacggggttcttggtcttatccttggattcgatgattaccttctccgaaagaccggtctgctcatcgcgctcgtcacggtaagtaacaccctcgataacactgtcataaacagctttaccctcatgctcggagatgattaccgcgttgtacggatcccactcgcagatcatgtcgcccttcttgacctcggcgccgtcgctcatatagagcatcgaaccgtaaggcaggttgtgcgtataaagcacgatttcggtcttgggatccacgatgcggaactccgactgacgcgaaatgacgatgtccacggcttcgccctgcgggttcttgcccttcacggtgcgaagctcgtcgatctccagacgaccttcgtatttcgaaaccacattggtctcgacagccgtaccggccgccacaccgccgacgtggaacgtacggagggtcagctgcgtacccggctcaccgatggactgtgccgcgatgacgccgaccacttcgccgcgctgtaccatgcgggccgtagccaggttgcgtccgtagcacttcgcacaaacgccgcgacgcgattcgcaggtaagcaccgaacggatttcgacggactccagcggcgatttctcgatggcctcggcaatcgactccgtgatctcctcaccggccttgcagagcacctcgcccgtgagcgggtgaatcacatcgttcagagccgtgcggcccaggatgcgatcgtagagcgtctgcaccacgtcgtcgttgcgcttgatggccgtagccgtcaaaccgcgcagcgtaccgcaatcctcctcgttgatgattacatcctgcgcaacgtccaccagacggcgcgtcaggtaaccggcatcggccgttttcagcgccgtatcggccaaacccttacgggcaccgtgcgtagagatgaagtattcgagcaccgaaagaccctccttgaagttcgagagaatcgggttttcgataacttgctgaccgccctcgacaccagacttctgcggcttggccatcagaccgcgcatacccgaaagctgacggatctgctccttcgaaccgcgggctccggagtccagcatcatatagaccgggttgaaaccgtcgtcatccttgatcagggtgtcgatcaccgtcttggtgagtttcgtattgatattggtccagatgtcgatgatctggttgtagcgttcgttgttggtgataagacccatgttgtaggattcgatcacctcgtcggcacgctcgtatccctcctggaccagtttctccttctcctcgggaataataacggcatcgaggttgaacgacagaccgccctggaaggccatctggtaccccatcgccttgatatcgtcgaggaatgcagccaccttgtcggcacccgccttcttcatcaccacggcgatgatgtcgcgcagcgaacgcttggtaagcacctcattgatataaccgacctcttcgggcaccacctggttgaacaggatgcggccgatagtcgtttccttcagtacccgcaccttgttgccgttctcgtccacgtcgctgaccatacatttcacctgcgcatgcagatcggcccgcttctcgttgtaagcgatgatcgcctcctcgggaccatagaaagtaaggccttcgcctttgacgcccttgcggggcttggtgatatagtacagaccgagaaccatgtcctgcgaaggcacggtgataggagcgccgttcgcggggttcaggacgttgtgcgaaccgagcatgagcagctgggcctccagaatggcggcattgcccagcggcagatgcacggccatctggtcaccgtcgaagtcggcgttgaacgccgtacaagccaacgggtgcagctgcatggccttgccctcgatcagtttgggctggaaggcctggatacccagacggtgcagcgtcggggcacggttcatcagcaccggatgccccttgatgacgttctccagaataccccagataacggggtctttccggtcgatgatcttcttggccgatttcaccgtcttgacgataccgcgctcgatgagcttgcggattacgaacggcttatagagttcggccgccatatccttcggaatacccatctcgtgcatcttcagttcaggaccgacgacgatgaccgaacgggccgaataatcgacacgcttacccagcaggttctgacggaagcgaccctgcttgcccttgagcgagtcggacagcgacttgagggcacggttgctttcgttcttcacggcgttgctcttgcgcgagttgtcgaacagcgaatcgaccgcctcctgcaacatacgtttctcgttgcgcagaatcacctccggagccttgatctcgatcagacgcttcagacggttgttacggatgatgacgcgacggtagaggtcgttcagatccgacgtggcgaaacgtccgccgtccagcggcaccagcgggcgcagctcgggaggaatcaccggcagcaccttcagcaccatccactcgggtttgttccggccttccgaagcacggaacatctcgatcacattcaggcatttgagcgcctcgctcttgcgctgctgcgaggtttccgtcgaagccttgtgacgcagggcataggacatggaatccagatcgacctgctgaagcaacgtatagatcgcctcggcacccatctgggccacgaacttgttgggatcgctgtcatcgagcgactggttgcccttcggcagcgcgcccacgatgtccagatactctttctccgaaagggtctgcaaccgttccacaccctgctcggcggcagcaccggcgttgattaccacatagcgctcgtaatagatgatcgcctccagcttcttggaagggatacccagcagatagccgatcttcgagggcagggagcggaaataccagatatgcaccaccggcaccaccagcgaaatgtggcccatgcgctcgcggcgcacctttttctcggtcacttccacgccgcaacggtcgcagacgatgcccttgtaacggatacgcttgtacttgccgcaatggcactcgtagtctttcacgggaccgaagatacgctcgcagaaaagaccgtcgcgttcaggcttgtaggtacgatagttaatggtttcgggcttcagcacctcgccgctcgactgcgccagaatctcttccggcgaagccagtccgatcgaaatggagctgtaaccgttattcactttattgtctttattgaatgacataatgcaatgcttttttcttatcctctatatactactacctaccttcccttactccagcttgaccgaaagggccagaccgcgcaactcgtgcagcaacacgttcattgcctcgggaatacccggcttgggcaggttgtcgcctttgacgatggcctcgtaagccttggcacgacccatcacgtcatccgacttgatggtcaggatctcctgcaggatattggcggcgccgaagccttcgagcgcccaaacctccatctcaccgaaacgctgaccgccgaactgcgccttaccgccgagcggctgctgcgtgataagcgaatagggaccgatcgaacgggcgtgcatcttgtcgtcgatcatgtggccgagcttgagcatgtagatcacgcccaccgtagccggctggtcgaacttctcgcccgtaccgccgtcgtacaggtaagtacgcccgctgcgcggaatacccgccttcgccgtatattcgttgatctggtcgagcgaagcaccgtcgaaaatcggcgtagcgaacttcagtcccagctccttgccggcccagccgagcacggtttcgtaaatctgaccgaggttcatacgcgaaggcacacccagcgggttcaggcagatatcgacgatcgtaccgtcctcgaggaacggcatatcctcgtcgcgcacgacacgggccacgatacccttgttgccgtggcgtcccgccatcttgtcgcccaccttcagcttgcgcttcttggcgatatagaccttggccatctggatcacgcccgtctgggggagttcgtcgccgttggtgaggttgtatttctcacgcttgatcgcggcatcggccttcttccattcgatcgtatagttgttgatcgtcttctctaccagcgcatcgaggtggctgtcgcccgtccacttgcaggtccccaggttcaggtaccccatcgcaacgcccgacttctcgtcggtgactttgcgggagagctcatcgagcagcttctgggtgaatttcgttccggcaggatagagttccacgccgaagtaatcggtgatacccgtagtcgtcttgccctgaagcagcgtataaagtttgtttacgagctgcttggtcaggtcggcgacctgggctgcgaacttctcgtcgagcttctcgatctgcagcttctccgagctctttcccgcacgcttgttctctttgccggcacggctgtaaagcttcgtgtcgatcaccacaccgtgcagcgacggctgcgccttgagcgaagcatccttcacgtcgccggccttgtcgccgaagatcgcacggagcagcttctcctcaggcgaaggatcactctcgcctttcggagtgatcttaccgatcaggatgtcgcccggatgcacgttggcgcctatacggataataccgttggcatccagatccttggtagcgtcctcgctcacgttcggaatatccgaagtcagctcctcgacgccgcgcttggtgtcgcggacctccatgatgtactcatcgacatggaccgaggtgaaaatgtcctcgcgctggatacgctccgaaatcacgatggcatcctcgaagttgtaacccttccagggcatgaaagccaccttcaggttacgacccaacgccaactcgcccttctgcgtcgaataaccttcggtcaggatctggcctttggtcaccttgtcgcccgtcagaacggccggtttcaacgtgatcgacgtattctggttcgtacgacggtagcgaggcagttcataagtcgtaatttccggctcgaacgagcagatcacctcctcttccgtccgctggtatttgatctggatcttggttgcatccgcaaataccacctcaccgtcgccctcggcgatgatctggatgcggctgtcggagatcatatccttttcgatacccgtaccgacgatcggcgactcgcaggtcaccagcggcacggcctggcgcatcatgttcgatcccatgagggcacggttcgcatcgtcgtgctccaggaaggggatcagacttgccgcgatcgacgcgatctggttcggagctacgtccatgagcgtcacctcctgggccgtcacaacggggaaatcggcgccttcacgggccttgatgcggtcgggctgcaggaaatggccctcgtcgtcgatcggaacattcgactgggcgaccacctgcccctcctcctcttcggccgaataatatttgatatcggcattgttgagatccacctgtccgttggtcacggtacggtaaggagtctcgatgaatcccatgtcggagatcttggcatagacgcagagcgacgaaatcagaccgatgttcgggccttcgggagactcgatcgggcaaagacggccgtagtgcgtgtagtgcacgtcgcggacttcgaaaccagcacggtcacgcgaaagaccgccgggaccgagggccgacagacggcgcttgtgcgtgatttcggccagcgggttgatctggtccatgaactgcgaaagctgcgaagtgccgaagaacgaattgatcaccgaagagagcgtcttggcgttgatcagatcgaccggcgtgaagacttcgttgtcacgcacgttcatacgctcgcggatggtacgtgccatacgcacgaaacctaccgaaaactggttcgaaagctgctcgcccaccgtgcggacacgacggttcgagaggtggtcgatatcgtccacctcggctttcgagttgatgagctggatcaggtacttgatgatggcgatgatgtcctcgcgcgtcagcgtgcggatcgccggatcgatgtccaaatcgagcttcttgttgatccgataacggccgacatcgcccaggtcgtaacgcttgtccgagaagaagagcttctcgatcacgtcgcgggccgtagcctcgtcgggcggctccgaagcacgcaactggcgatagatatacaccacggcttctttttcggagttacacggatctttctgtaaagtattgtatataatagagaaatcgatacccgacagattctccttatgcagcagaatcgtcttggcaccgctctcgataatctggtcgatatgctcttcctggagcaccgtttctcggtcaacgatcacgttgttacgttcgatcgaaaccacctcgcccgtatcctcgtccacgaaatcctcgacccaggtcgaaagaaccctggcggccagcttgcggccgacggccttcttcagagcggctttggtcactttcacttcgtccgcgagatcgaaaatctcgaggatctgctgatcggcttcgaaaccgatggcacgcagcagggtcgtaacgggcaactttttcttacggtcgatgtacgcgtacatcacgttgttgatgtcggtagcgaactcgatccacgatcccttgaacgggatgatacgagctgaatagagcttcgtaccgttggtgtgcatgctctgtccgaagaacacgcccggcgagcggtggagctgcgaaacgatgacgcgctcggcaccgttgatgacgaacgtaccacgttcggtcatatagggaatcgtaccgaaatagacatcctgcacgaccacgccgaaatcttcgtgctcgtcatcggtacaatatagtttcaatttggcttttaagggaacactataagtcaggccgcgttccagacactcttcgatcgaatagcggggcgggtcgatatagtagtcgatgaactccagaacgaaattgtttctggtatcggtaatgggaaaattctcctgaaacaccttatacagcccctcgttcttacgattctcggccgtggtgtccatctggaaaaaatcccggaacgatttaagctgtacctccagcaagtcgggataaggcacccggttcttgactgtcgaaaagctaactctttgttgtgtttttgtcgtggacatcggtaaaatccaaattaaagttgaaggtttaagtattccgggggaagcccccgcagcggacctcttctaatcccgctaatgcccccagtgtaaacagattacaccctgagagcatccaaacttccaaagaccagacacagctcctgtcggcacttctaatctttagaccagaaaaggcatagagcttacagcagcgtaagccctataccctgagtttgtcctgaaacttttaagtagaaactacttaacctcaacttcagcacctgcctcttcgagctgagccttgatcgactcggcctcctccttggaaacaccctccttgattgctttcggagcagcatcaaccaaagccttggcatcgcccagcgacaggcctgcgatatccttcacaactttgataacctggagcttcgactggccagcgttcttcagaatcacgtcgaatgcgctcttctcagcggcagcagcctctccggcggcggcagcaggcgctgcaacagcaacggctgcagctgcgggttcaatgccgtactcctctttgaggatcgtagccaactcgtttacctccttaactgtcaaatttaccaattcttcagctaatttttttacatctgccataagttcaatcttattaaattttgtttgaattcttgtttgttaatttctttcttcgagcgtctttacgatacccgcaatcttttggcctgcattagactgcaatgcagagataacattcttcgcaggagattgcagcagggcgatgatatcgccgataagctcctcccggctcttaatgttgcacagagtgtccaactggttgtcgcctacatacacgcagccttccacgtacgccgctttcagtaccggcttgtcggaagtcttgcggaactccttgatcagcaccgcaggcgtcttgcccgtgtgggcgaacattaccgaggtcgaaccctccaatactttcaccaaatcagcatccgctttctccacccgctccagcgctttggcaagaagcgtgttctttacgaccaccagcttgatgtcgctttcgaagcacttgcgacgcaacgacgcagtctgctcagcattcaaagcctcgatgttcgtaatgtaaaagtgaggatactcgttgagctgctcggcgaggctgtcaatgacaaccaatttttcttccttcgtcatctcttaaatcctccctcttatttagtttctactgatttagcatcgatctgcaagccagggctcatagtcgtcgagaggaaaatactcttaacataagaacctttcgctgcagccggtttcaatttcataatcatgctgagcaccgtattcacgttatcggcaatctgctccgcagagaacgaaatcttaccaactgaagtgtggataataccgaacttgtccactttgaagtcgatcttacccgattttacctcacttacagcctttccaacttccatcgtaaccgtgccggtcttggggttcggcatcaggccgcggggacccagaatacgacccagcgcacccaccttacccatcacgttcggcgtacagatgatcacatcgatatccgtccaaccggacttgatcttctcgacgtattcatccaaacctacgtagtcggcaccggcagcctgcgcttcggcctctttttccggagtacagagcacgagaacccgtacctgcttacccgtaccatgaggaagagtcacaacgcctctcaccatctggttggccttacgcggatccacgcccagacgcacatcaacatccaccgaagcatcaaatttcgtaaaagtaatctccttcagaagagctgcggcctccgtaagcttgtaagccttttcgggctcgaccttcgcgtaggcaattttttgattttttgtcaacttactcattcttgtaattgcaattacttgttaggaaattctccaacgacgttgatacccatactgcgcgcagtaccagcgatcatacgcatagcagcctcgatcgtgaaacagttcatatcggacatcttgtcctgagcgatctcacgcacctgatcccacgtcacctgaccgaccttgtcgcggttgggctgtgcggaacccgatttagctttggctgcctccttgagttgaatggctacaggcggctgttttacgatgaagtcaaacgacttgtcgctgtaaaccgtgatgatgaccggaagaacttttcccgccttgtcttgtgttctggcattgaactgcttgcagaagtccataatattgactccttttgaacccaatgctggtcccaccgggggagaaggattggcagcaccacctttgatctgcaatttgataaatgcagcaacctcttttgccatagttttccttggttaattattctttttcaacttgtgtgaaactcaactccataggagttttgcgcccgaatatcttcaccgataccgtgagtttcttgcgctcgttgtcgacggcctcaatggtaccttggaagcttgaaaaaggaccatctgtaactttgatggtttcgccgacaaagaatggtatttcgttttcttcctccatcgaactcaattcatcgacacgccccaggatgcggctgacctcctgcggacgcaggggcgtagcgatcatcttgcggctgtcctccttggtgtcacccaaaaaaccgagcacgttgggaatattacgaatgataatagggatctgaccgacaaaggcggcttcaatcaatacatatcccggataagaaaccttctctttggaaaccttcttaccgttacggatcgtatagactttttcggtcggaatcagcacctgcgaaatatactcttccaggtggctgtggcggatttcggattcgatgtactcttttaccttattctccttgcctccgatcgtacgaactacataccactgtttcgctgtttcgctcatggtcacaaaaacaattaacgaccgagcttagccagggtcctgtagatagcctccataatgttctcaaacgaaatgtccatcgccaaaatcacgatggcgaagatcaacgaagcgaccatcaccactaccgtcgagttctgcaactgtgcgaacgtcggccaggtcactttatgaaccaattcgttataagattcttttacgtaattgaacatattcttcttactttattttagcaggagcagagagattcgaactcccatcaacggttttggagaccgctattctacccttgaactatgctcctaaaaagtagtgcaagtcaatccctgcactactaaaatatccctgggattaggcgagaatcttcagaatctgacctgcacctaccgtacggccaccctcgcggattgcgaaacgcagaccttcgttgagtgcaaccgggtagatcaactcaacggtgatcgttacgtggtcgcccggcatcaccatatctacgccttcgggaagagtaacctcaccggttacgtccatcgtacgcagatagaactggggacggtatttgttgtggaacggcgtgtgacggcccccctcttccttcttcaggatataaacctcagcctggaacttggtgtgcggagtgatagaacccggtttagcgacaaccataccgcgcttaacctctttcttgtcgataccgcggagcagcagacctacgttgtcaccggcctcgccctcatcgagcaacttgcggaacatctccacacccgtacaagtcgaagtcagcgtcttctcctccagaccgatgatctcaacgggatcacctacgtggataacaccggtttcgatacggcccgtaaccacggtaccacggccggtgatcgagaatacgtcctcgacaggcatcaggaacggcttctcgttctcgcgctgcggaatcggaatatagttatcaaccgcatccatcagctccatgatcttgtcttcccacttagcctcgccgttcagaccacccagtgcggaaccacggatgataggagcgttgtcgccatcgtagtcgtatttgctcagcagatcacgaacctccatctcgaccaggtcgagcatctcgggatcgtccaccatatcgcatttgttcaggaacacaacgatcttcggtacgttcacctggcgagccagcagcacgtgctcgttggtctgaggcatcggaccgtcggttgcggcaacaaccagaatcgcaccgtccatctgtgcggcaccggtaaccatgttcttcacatagtcggcgtgacccgggcagtcaacgtgtgcatagtgacgatttgcagtctggtactcaacgtgcgaagtgttgatcgtaataccacgctctttctcctcgggagcgttgtcgatagaatcgaacgaacgaagctcagaaaggccttttttagccagaacggtggtgatcgctgcagtaagagtcgtcttaccgtgatcaacgtgaccgatagtaccgatgttcacatgcggtttggaacggtcgaatttttcttttgccatagtataaaagtattaagattttataaaaattctgctcttcaaaacgtctgtcgtttcgcaagagtgacgagcgacgcaatacctctcctcaaagaggtttgcatcacgcgtcaactgcatttctggagcggaagacgaggctcaaactcgcgacccttagcttggaaggctaatgctctatcaactgagctacttccgcaaaaacgcaccgcaaggagtttccccttcccgatcgactcggaaatacagacaacccgttcggcactctttttatgtgggaagtgatggattcgaaccaccgaaggcataagccagcagatttacagtctgccccatttggccactctggtaacttcccttatgtttctaaaccgctttcgctaactccaccgtgtcggctccgcaaggtttttttggagccgatggagggattcgaacccccgaccagctgattacaaatcagctgctctggccaactgagctacatcggcatatagaccaatttggattgcaaaattaaggaaaataaaattaacaaccaaaaatttgatcattttattttatcactcctctcaaagaacgttctcggcgatcgaaatcgaacgcgaaatcgggtgcaaatatagcactctttcgggaattaaaaaatagttgcgcggacttttttatccggaacgcagaaaaagtcgcaaataagtccataccacaaccaaaccgaaagcacaaatcgacgtcccacagcaaaaaaatttatatgaaaacgatacaaagcagtatttcacggcacgtcctattcaaatgtcgtcttgggagaatctccaaaagacggtgaaattcatcattttatcatgacaatcattaccacacactctgatttatccctaaaagatacacgaaatttcctccgatcgactaattttgccgtatggaacgtacgaaggctgtttttaactggagcggcggcaaggattccgcccatgcgctgtggcgtgccatcgaatcgcagcgctatgaaatcgtcgccctgctgacgaccgtcaatcacgacacccgacgctcgaccatgcacgggatcccttttccccttttacaggcacaggccgcaagcatcggcattcccctccatgcggtcgatctcacgcccaaaggcgatatggaggattatcagacagctatgtcgcaagccgtcgcgcatttcaaagcacaaggtgtaacgcacttcatcttcggagacatcttcctgcacgacgttcgcaaataccgggaacagcagctcgctccgcacggcatcgaagtcgtcgaacccctttggggccgcagctccgaaaccgtgatgcacgatttcctggcctcaggcctgcaaaccgtcgtagtaacgaccatggccgacggactgggagccgcagccatcgggcggaccatcgactccgatttcatcgcctccctgcctgcggggacggatcccaacggcgaaaacggagaataccacaccttctgttacgacggcccgattttccgcacgcccgtccggttccggctggggagtcccttctcccgaagttacgacatacggctcgacgacggcacggagaaaacctacacctactggttcgccgatctgcaagagccataagccatctatgtcgccgacacttccgatggtatgccttatggttgttcccggaatcggcaccgcacagaacccggctgaccgaaatccgcacgaaccgccgcctctgacaaccaagaaagacctacacctatgataaccagaattatcccgtaccgaaaaataagcctctgctccctattactcgcactgctggccccggtactcctgacagccggatgcaacgacacccaggaaaatgaaggggcaccggatcccacgatcccgttgcccgaaccgaaaccggagccgaaaacttatccgctggtaattaccgacatccgaaatcttcccccgaagacgactttcgaccggatcgcggtccaaatcacgggtgtagattggagtatcatcgccacggtcgaggcaccgtacgagaacggagcggcaacgttggcacttcccctcgaatttcctgccgaacagttgcaggtcgcggaccggcgcggcggtaacatggccggatactggcccggcaccgcaagcgacccggcagcactcgtggcgaccctcggggatttcatcgcttaccggggcgatgaaaaagtcggacgtatctatcgctccgactggtcgggcgaaggctcctcggcctccaaagccttcgtctattatcagtatgccgaccgtcctttcgaagtaaccggcgccacgacctcctactattacagcgactgctccttcgtcgcgggctggaacgctttcgccaacatcaacccgtcttcggaaggcttgcacggcaacatccgttgcacgacggccggactcgaccggctcgaactgacctggaatttcgaatcctgggcgcattagcgaatatgaaaaagagcagccataaggctgctctttttatcattattgcatcacgacgctaccgctgtgtccaaagtccgttcaccttatgacggatcaccagcatatcgatcaacactaccgccccgaccacgaggatcccggccagaagcattccccagataccgggcgccgcataatcctcaccgagcattcgtaccatcgggaggtatttcgaccgcacccaaacgaccaccggcacggcgcacgccagcaccgacaggttcagccccagcgccagcaactgatagggccgtgccacctgcgcaggcgtatagccgagcatcaacaggtcttcgagcttcttcaagttcttttgcagcatcaggaaaatactcaacaacagaatgaagaaggagagtacggtaatcaacagccccacgccgaccaccacccccgtcgccatgcgcagaaagtagctcgcccggccttcgtcgccggcacctccttcgatctggtagcggtggagcgcaaggtattcatggagccggtcgtccgcagcgttccgcacctccagaatgatccgcgaaggatcggccgcaggtttatcggcgaaccgacggttcgaccagcggatgaactcctccggaacgaggatcgtattcaggcggttggaaaaagccacgacacgccccttgagatttcggaactgcccccgtcccgaaagatccagatcgagggtaataccccgcacgagatcttcgctcacctgcggcaatccgcgcgtcgaagcgaatccgaaattataaagattcagataattgcgaggcagaatgatcggcacgaactcgctcccctcctcgaaaccccactcgtcgctccggacatcgaggaaacggtcgggtacgctctcgaaaaacaggtaggtccgcatgccgatccccgccaacgaaatcccgcccatcacgctgtaacgcgccggcgtaaactcgcccagcgcctccgtgaagggctgctccgcaagttcggccagctccgcctgcgtgaaggaggtctttccgatgccggccccttcgacctctttggtgagaatgatgaaatcgttgtccaggaacgaatcgggcgcttggagcgcaggcgtcacatcccggtaaagctgtacggccgtaagcacgatcgccacgccgaccagattggtcaccagaaagcccgccaactgcaacacgctgacgtgctgacggagtaattgccagatcagtttcatagcgaaaagactttatcgtactcgatctcgaaacgcttgcctaccgaggtgacgatgacccccgtgccgttcgtccgcacctcttccagaagaattccggccatgaccgcagcattccgctcgtcgaggtggctcatcggctcgtccagcaacatgaaatccgccggctgacaaagcatccgaatgaaagccacgcgctgctgctgcccgaaggagagcttcgacaccggagtttcccgcttctcggcaatacccagcgcctcgaacaaccaggcaatctccgcctcggagcggcggcccgtcaggttgttcttcagacgcacattatccacggcgctcaactccggaaaaagacgcagtccctggaacatcatcgcaagcgaacggcagcgcaggccgctccactccccgacgctcaactcgcgaatatcccggtcatcgaaaagaatcgttcccgaataatcgcgccggtagccgtacaaatagccacaaaacgacgactttcccgatcccgaagccgcttcgaccagatatacacgtcccttgtcgaacgttacatccctccgccaaatctccgaccccacgggcggattatccgcaaaaacatccggcagcacctgccgcaatccgattttatccatcgtccaatctccttcttcattcaccccgccgggcaggaaggcgaacccgcccacgagccgggaacattacgacgactgcgcggcaggcgaaatgccagccgcgcagagtcgaatgatcgatcctttttctccaacatgggcagcacgaaactcgaccgcactcgccgtccacgtcgaacgaaatatcaaaatatcgcctcgcacagccgccgctattccgggaaaaacccgttaatccgcaaaacgactgtccggactcttccgacttaaaacatagtcgccgcgaacatctgggcaaagccctcgatggtcttgtaaagaacctcggcggcattcttatccttatccgtcatattcaggacaagctcgccctgacgctccgtacggccggtgatctccagcgtatcgaacaacgaaagcgccatgagcgatgcggctgccgactgatcgagccggttctgtgcgatcaggctctcgatcaggctgcgcacggccgggaaatcgacaaacatcgtaccgtaagagcctcggaacagtttgccgacctcggcctcgtatgcagaggtctgtgctccggtcaggaataccagggcgtcggaatcggtcgtcgcatagaacgtattgtcgttcaaaccgaaatagatcgtcgtattggcatccgggctcaacgcatactggccgggagccatctcctgcatcggcacgggaatcatccctttgatcgtttccatgatcgccggatccttcagctccgcgatcagcgaaagctccggcatccggccgttgtccgtcatcccgtggaacgacaaagcgatgtcgccgtcgatcgcctccatgatcggcttcacctgcggagccatggcgaagaccatcgaatacatcggaattttctgaagcatttcgtaagttctggtgccgtccatactgcccgcgagcgtcgctacattctccgcaggcagcatcttcagaaaatcgccgtccatcttacgctgagccgccaccatctccatatactgtttttcggcctccttgtcgctgaagagaatccgcgcctcggccacgatcttacccttctcgaaatcgaccggcatcgccatcgacatcttgttcaggaactcgaaacccgacaatccggccgtgccgatctgctctccggctaccgccataaccgaaccgtaatccatcacgaacttcatatcgctgggacgctcgatggcctgtgccagctgcgaattgcccatcagactctctgttttcttctgggcgaagagcttcttggcggcagctttcgcctgatcattgtcaacgggagcggtatagaccaaaagggccgtttcgtcataagcgacgacaggcatatccgcgccctgcgtattggcaaggaaggtgattccatcctcttcgaacgaggtgaaaccgctcttctgcgaaagccagcccaggaaactatcgagcttcttgcgatcacccaccttgaacaaaccgccgaccgtaggattgcctgtctgcgacgcattctccatcgtcacgaacataaacacgtcgctgcccacatccagccccgtttccgaaggatgcgccaacaaagagaggatgcgtccgcgctcctcttcgggcgcatcggccaaagcttgctcggccatcttataataaacgctttgggtaaaatcgccgacctgcgctttccgggacagggattcgggattgatcgaaacgatcacgaaagagtcggccggcagcatctcgcggtaatccttaccgccacacgatgcgagcatcagcgccacgagcgctatgcagaagaagtagagttttttcatatcggtatttttataattgtgttatcaatccattaacaatccgggataaacctattctattaccttcacgccgagacgcaaccggaccgaatcgaaatccgcctgcggcaaataggctgcaaagcaatatccgggtttatttacgccttaccggggcataccccgtgttttgatattacaaatatattaaatattttacgggcagccgattttatttttcagccctctcttgaaaaagaagtcagcggatatcgacgagttcgatctcgtagaacaatgtcgtattcggggccacgcccaatttcttgtcgccttcggccccgtaagccaggcgggagggtatccatacattcattcgaccgcctttcccgacgagccgcacgctctgccgcaacccgggcatcaggtcgcccacggccatacgcgtagtatctccgcgttcgtatgaagactcgacaacctttccatcgaccgtcttggctgtaaaacggatcgccaccgtatcccggtcgcttcggggcgtcttggattcatccccgacctccagcacctcgtacgtcagccccgtatcggtcttggcataggagcgattgctcttacggaaatcctccaaaaactgttcttcataggcccgaatctgttcgggctgcgaaacattcacataacgcagataaaccgcacgggcctggtcgggcgtcatccgggccgtccgggcatatacgtcccgcacggcctggcacacggcttcgacgttgagggtcgaatccatccgctgcaaattatatcccacattcagaccgatcacataagcgaccgaatccgtttcgttacgcaactccacgctccccgttccccgggagcaggcgcccagcaggaacagtcccgctgcggcgatcaatcgatatttcttcatatacgtgtctttttcttggaaaagaggaaaatcaggaccgtacccaatacggccgacgcgaacgatcccatcagaatggcaatcttgccccggctgacgatctcggcatcggcaaaggccagcgtatcgacgaaaatcgacatggtgaacccgataccgcccaggcatgccacggcgaagagcatcctccagccggctccctcgggcatttcggccagtttcgtcttcacggcaagccaactggccaggaaaataccgagcggcttgcctacgagcagtccgaagaagacacccatgccgaccgcaccggcctggggcgtaacgtggaagattcggaagtactccagcgaatcgatcgaaacacccgcattggcgaatgcgaaaataggcataatcagaaaagtcacgtacggagccagcagatgttcaagacgatagctcatacccaccgaatcggtcgccagcgaggacatcatccgcaggtagtgccgatgctcctcgttcgggaaatcgtcggcccggcactcggctttcaacagcgcatcggacagaccggtcatcttacgtgcaaaatactccttgctgtaacggggcttcatcgggataaacatagcgatcaccacacccgacaacgtggagtggattcctgaataatagaacagggcccagacgacgaaagccggcaccagatagaacataatgcgggtttcgcccactttattcaggaaatagatgcctatgaggatcaggatcgcaatcgcaagcagcaacaggttgacctcctctccgtaaaacagcgcgatcaccaggatcgcccccaggtcgtccgccacggccagggccgtcagaaatattttgagcgaaatgggcacccgatcgctgaatatcgaaaggatgccgatggcgaaagcgatatccgtcgccgtagggattccccaaccgggcgccgcgacggtccccgcgttgaacgaaaaataaatcagtgcagggaccaccataccgcccagagccgccagtacgggcagaatcgccttcttgacggaagagagctgtccgacgacgatttctcgtttgatttcgaggccgatcaggaagaaaaaaaccaccatcaggccgtcattgacaaaggtctgcagggtcaggccccggggaaacatccagtcgatcatcccccccgatccccgcaccaccaaagcgatgtcgatgttgagcagccgttgataaccgtccgccgtcagcggaagattggccagcagcatcgcaacggcaacgctgatgagcagtaccagtccgcccgaccaaggagcctccagaaaacgacgtccccgtaattggaactgataatgtcgccgcacccagcggtacatggaaaaaagcctcattgtctgttaatcatttaatttcaaccggttcgaacgatctctttcagtatctccgatgcaggatcaacccttgttggccgataaagtccgcaaagtcaaaccacatagtttatagagtacgcgagcacccacgaccgcgtcgatcttatcctccgggcagggaacgacctccaccaggtcgaacccggcgatgcgacgccccgaatcggccacgcactccatcaggtaaaccacctgttcaaaagtaatgccgcccggaacgggagtgcccgtatggggacaatgttcgatggtgagtccgtcgatgtcgaaactgatatagaccacctcgggcagctcgtccacgatgcggcgacaactttcggcccaggtcgttcccgcgaatccggcgcgagcgagcgagcgcgaatcgaacatcgagatccgcccgtccgaagcggctctttcggcctcggcatcgcaataatcccgcacgccgacctgcacgaacttgcgtacctgcggcaggtcgcgcagtacgttgaacatgatcgaagcgtgcgaaaattcgaatccctcgtacgcctcacgcagatcgcaatgagcatcgatatggagaattcccagcgaactttccttttcggcaacggcacggatcaagccgtacggcgtcgaatggtcgcctccgaccagccctacgaccttaccttgcgagagccactggcgggcctgacggtaaatattgtcgttcatggctgcacaaccttcgttgatgcggcgcagacggcgctcgatacgttcgtcatccggcgctccgccctcttcgaggtgttcgatcacccgctcggcatcggcccgcagcttgcgggactcctccagcagcgaatagtcgatatcggccgtagcgatgcctccgagccaggctcccggcgccgaagcatcgtaaagatcgagctgtgtggaggcttcgatcagggcatccggcgccaaagccgttccggcaccgtaggatacggtcacgtcccagggtgcggaaacaagcaccagcgcagcctcctcgggcgtgaacggcaaaccgtaataagcgccgttgtccacccccaccccgttgggattgaatgttttcagatccatagtctttccttgtaagaattacaaagatagtaaatttttgattttccgccatctctatcgcggataaaccccgtttttaacggggtgccgaccggccgacccggacgacacccgaagcgaaagccgtatgcaccggcgcacggttcccgtaaaatggagttcaaataaatttggcgccgccctcgccctgcactatctttgctccgcaattaaccaattcgaataccgtcgtgaaaatcgtcgccgacaatgccataccttttttgaaaggagtactcgaaccttatgcccgggtggaatacctccccgggaaaaccatcgcaacggccgatgtccgggatgccgacgccctgatcgtccgtacccgcacccggtgcgacgccgccctgctcgaaggatcgtccgtcaaactgatcgcaacggcgaccatcggcttcgaccacatcgacacggagtattgtcggcgacacggcatcgaagtagcgaccgccgcaggatgcaatgcacggggcgtactgcaatacgtcgctgcagcactggtccgcctctcacgagtacaggcctgggaacctgcagacaaaaccctcggaatcgtcggtgtaggacacgtcgggtcgctcgtcgaggcctacgcccggacgtggggattccgcgtcgtggcatgcgatcccccccgcgaagagcgcgagcacggcggattcctgccgctcgaagaggtggcgtgccaggccgacatcctcaccttccacactccgctggacgatacgacccggcacatggccggggcgaagctcttcgagcgaatgaagcccggcagcatcctcatcaacacttcgcgcggcgaggtagtcgatgggcaggcgctccgcgaaagcggtttgcaatacgtcctcgacgtctgggaacacgagcccgatctcgacccgctactgctgcgggacgcattgctcgccacccctcatatcgccggttattccgcccagggcaaggccaatgcaacggccctgtccgtccggacgatcggccggtacttcggactgtcgctcggggagtggtatccgtcaaacatcgccccgtcccgtccccgggcgatctcctggcaggagctttgcgacacgatagacgaccgcttcgacatcgccgccgaaagcagacggctgaaagagaaccccgaaaaattcgaaacgatacgcaacgaataccgctaccgggaagaatatttttaacaatttagatgcttttttcttaactttgcggccgaaatcgaccgcaccgcccattatgtatcgtaaactgatcaaacccatcctgttcgccatgaacatcgaacgcgctcacagcacggtcctgttcctgttgcgcatgatcgggaaaatcccgggcggacgggcgctgctgcgtgccatctaccgcaccgagcacccgtcgctcgaacgggaggtattcggacttcggtttcccaacccgatcggtctggcggcgggtttcgaccgcaacggagaagcgttccgcgaactttcggccctgggcttcggattcgtcgagatcggcacggtcacgccccagccccaggccggcaatccccgcccccgcatcttccggctgcccgcagaccgggcgatcatcaaccgttcgggactcaacaacaaggggttatacaaggccatcgcccagctccgccaccgacacgaccggcttatcatcggaggcaacatcggcaaaaacacgctgacacaaccttcgcaggtcgcggccgactacctcaaaatgttccgtaacctctaccagtacgtcgattatttttcgatcaacgcctgctgcgacaattgtgcggacggcagcgtatcgcacaacaaagcccacctgatgaatattctgcagccgctcttcgattttcgccgcggccagaaccagtaccggccgatcctgctgaaaatatcgcccgacctgccggacccgcttatcgacgaggtgaccgacctgatgctctctacgccgctggacggcatcgtggccgtgaacggaactttctcgcgcaaaggtctcgaaaccgatgaggagacgctcgacgaaatcggcagcggccgattgagcggagctccccttacgcagcgggccatcgaggtagtgcgccgcatccaccgacgttcgcacggagcctatccgatcatcggcgtcggaggcctgatgaatgcccgggatgtgaaagccatgctcgccgccggcgcgagcctcgtccagctatacacgggatatatctacgaagggccctccctggtcaaggagatctgccgggccctgatcgacgacgcagcgtccgaagcctccgcttcgcccgcgccgggaaaataattcaatcttaccaccatgaaagcatctattcttacgatcggcgacgaaatcctgatcgggcagatcgtggataccaattcggcgtcgatcgcccgtcacctgaacaatgcgggcatcgtcgtctgggagcgcacatcggtcggcgaccagcgcgagcagatcaccgaggccgtaaaacggaccatgaaccagagcgacgtagtcatcctgaccggcggcctcggccccaccaaggacgacatcacgaaaaagaccctcgccgagctcttcggctcccggctcgtatgcgatcaaaccgtcgccgaccacgtgcggcgcatgctcgaagcacgcggaatcgaatacaaccgcctgaaccgcgatcaggcgctcgtcccggcgtgctgcaccgtgcttttcaacgcccacggcacggcccccggcatgtggttcgaacagaacggcaaggtcgtggtttcgctgccgggcgtccccttcgaaatggagcacctgatgaccgacgaggtaatgcctcgtctgaaagcccgtttctccctgcggcagatcgtacaccgcacgctgatcacggcaggtctggccgaatcgatgctggccgaaaagatcgccgactgggaaaatgccctgcccccgtacctccacctggcatatctgcccgcacccggcgtggtgcggctgcgcctgtcggcctacgaagtcgaaggcgagagcgtatcgcacgaaatcgaccggcaattcgccgccctgcaacgcatcattccccgctacgtcctcggattcgagcgggcgaccatgcaggagatcgtccacaacctgctgacgcagcgtcggcagactctcgccacggccgagagctgcacaggcggcagcatcgcagcccgcttcacggcaatgcccggagcctcggcctatttcctgtgcggagtggtggcttacagcaacgaatccaaaaacaacctgttgggtgtcgatcccgaaacgatcgccagccggggcgccgtcagcgaggaggtcgcacggcagatggccgaaggagcacgccgcatcaccggagccgactatgccgtcgcaaccaccggcatcgcaggtcctgcgggcggtacggaacagaaacccgtcggcacggtctggatggccgtagccggcccgcaccgtaccgtaaccctgctcaaacaatgcggcaccgaccggggacaggttatcgaccgggcgagcgccttcgcactcgcgctcctgcgcgacgaaatcgaacgggatgccgccggagaataacccggtttcgacacttcccaaagccccctgacttccggagcctcgaaaggttccggaagtcttcatatccccgtctctggaacaagccccgttcctcccggaacgcatccaaccctttccgatacgctgtccggccggacgcccccgaaaatcgcgaaacaaaagcccgatacgatcactagcaccgtccgatgaaattcaaaggcggatcattgaacacaccccgtcgaaaagagttaattctccgaccgtaattacgggcacctcataccgctatatatcaaacattcgccttccaaaaccgaaattcgaagctattcccgaacagattcttcctcccggtcagcgacaaaatcacccagttattcccaccgcccctctatccgcacgattttcggaaacacgggaacggccttgaaaacgggatctttcgacaaatatactttttgagaaatgatataaacgaaatgagagagcaatatacgcctgctcccttcatctttgctgcaacaaaatagcatccgtattcccgaccgtcaaaagccccgaacgaaagtcctcccggcaaacagatttcgaggccgatcgaacgacaccggaaagccgatcgatacggaccggcgcacaccgccccgaaatgatccgagcacatgatatacatcggttattcccgaaaagaaaaaccgacaagtctaaccatcaaaaaacaaaacccatgaaaagattcttacatttgctcacagggatttgcaccctcgccctggctcttcaggcctgtaccaagtctccggccgaaaacccgggaagaacggacgatcccggaaacgacgaacaaaacagcaaggtaacccttactctctcgacgccccgcacccgcacgacgctcgtcagcgaaacctacgtccactggagcgaagaggatattgtacaaatcaacggcacgaatttgcccgtaatccccgatccgaatgatccgacacgcgcaacgatctccaatgtggacaccgccgaagagtacgtggctctctactctccggacaacggcggatatatcccggagcgagaggtcgtcgaagcctacttccgccccgaagtgccccatactcccgactcgttttacacgacaggaggcaatccgatggtggcatacagcacatccacctcgctggaattcaaaaatatcggcggattactccgcataggagtgaccggcgatgcgtcgatcgcgtcggttatgctgtcgggcaatgcgggagaacccattgccggacacttcgaaatctcgaaaagcgatctggcttccggcagcctcgatttcgctcccggcgaaggttccgcacaattcgtcagcacctccgtcacgatgacctgcacggagaatgtacgactcgatgcgaactctccgacctatttctacttcgcgctgccggcagccgaatacacggaaggattcaccgtaacgcttaccgacagcgaaggcaacacctgcctccggcaaacgcataactccgtctcgatcgagcgtgcgaccctcaagtcgatggaaccgattgcgttcgaaaaggacaaagcgcttacggtcactttaggagaaatcgcggcgaactccgttacctggaatatcgaaggtaatccctcgaccgacctgcggaccctgctcgtcaccaaagcgatgtgggatcatttcatcgcacaggaatattacctcgacaatccgcaaaaactcacgtccgaaatcctcgcggcctattccgccaccattccgaccgacgacaacggccgttacgaagagactgcaacccaggcaagagccgtaaactcgatgcagcccgtacaggaagacaacgactacctcgtcttggccgcctatttctccggcacccaatccgtcggcgtaatccccgccccggttcccgttcacactccggccgccacaggcccggctcccgaagtgaatgtcaccgtctcttcggccggcagcactacgatcgatgtacttaccaccaccagcaacgcatccggcatccttaccgcactcttcttcaaaagcgattacgacaatgtattcagccgggagggaatagacgaagagttgatcgcaaagtacggcaatgcatggacggcagagcaggtagagcaggccaacaacggaggatatacactccaatacatttcgcttccgccggaaacggaattcgttatgctaatttcggtctccagcgcagcaggcaaagctacgctcaagaaagaaataattgcgaccgaaccgtacgtcgatccttctgccgaatggatcaccgtttcctccgaagccacgttcgtttgcggcttcttcttcaaccaaagcatcccctccttgtcgaacgtgatcaatattacgaaccttaaagtcgaaaaactcgccgatcgcgacctcttccgtctgaccgacgccttctccgtctcccggatccccgaacttgcggccagcggcatatacagcgatctgtccggcagtccgtattatttctatatggatgcgaccgacccgaacaatgtaaaagtcgtcaatgaagtgtgccaactcggcatcgttcacaacgaatacggagcaatgagcgtcggcaacgacttcaacatccaaggcggcgaagagtaccagcacggtacgtacaaccgagcggaaggcacgatccgaatcggcgtgctcatttgctatgccgacagccaacaactcttcgtcacgccattcaacagtacgctatatctgaatcccgaaacgcccggaaacagtgtttcgaccgaaaatttcaagaaagaccctgtcgcaattccctggtaagtcaggacccccgaaaacagagacaccggccctttttcaggccggtgttttgttatttggccaaaagattgtatatttgcactccccgaaatgggattacaattaaattttaaccaaaatgaaagtttgcgaaattacaggcaaggtagcggtgatcggcaacaatgtttcccactcgcaccacaagaccaaacgcaagttcagccccaatctgaagaacaagcgcttctggtctgaagaggaaggccgctggatcaccctcaaggtatctgccgccggaatcaaaacaatcaacaagaagggcctcgcagtagcgctccgcgaagctgccgcacccaaaaaggtttactaaaactcaagtgacaaatggcaaagaaaggcaacagagtgcaggtgattctcgaatgcacggaacagaaagctagcggtgttccgggaatgtcccgctacatcacgaccaagaacaagaaaaacacccccgaccgtctggagcgcaagaaatacaacccgttcctgaagaaggtgaccattcatcgtgaaatcaaataattttagtgctatatggcaaagaaagtagtcgcaacgctgaaaaccggtacgggcaaacagttcaccaaatgtatcaaaatggtgaaatccgacaaaaccggtgcatacatcttcaaagagggcatcatcgccaacgaccaggtgaaagactttttcgccgagaagaaataaatgcaatgcattaggcgaaacgaatgttttcggatcgcaaggccggaaagaatcatccgccgggccggattcggaaaacgatcaaagaaattcgattccgcttaatacaaagggcatcctcaacggatgccctttgtattttcaccgccccgcaacccggcagaacagcaccgatcatcgaggaaccattcgtaccttcgttcctctttcaactgcttcaccgcgacaagatgggaataaattcgctttgcacccgttgatccgtatcttccctaaatactccaatgcagcaacgctcaaaaaaaatttggctccgccggctggttgtactatctttgcagaagacaggaagcgattcggcaatctttgcgtgcaaacccgcacgattgctctcatctttatattatctttgatagtcttagataggatgcgcctcgaaaaactggaaacaagttcccgttttctttcggcttttcgtatctttgcaaaaggcagaatacagcccggacacatccaaacaaccgacaaccgaagcggatgcagaaggcactcgcggactctgctacgcaagaaggaggaaaactaaaaggtaagtttggcttgccgcttacctttcactatctttgcaacattgtctaatataacatattttatgggattcttcgatcttttcaagaaaaaacagaatacacagccgacgactccggcggaacgatctcaaccgacttctccggaaaaccaccggccggctgcggtcgaaaatacgacgaagcaggaaaatacctctccccagccggctgcccgaaccgctgaccgggagcaggcggaactcaactccggtctggagaagaccaaaacgggcctcttctcgaaactggcgcgggccgttgccggtcgatcgaccatcgatacacaggtgctcgacgatctggaggaggtgctcatcacctccgacgtaggcgtggaaaccaccgtgaagatcatcgaacgcatcgaagcccgcgtcgcacgggacaagtatatgaacacctcggagttgcaatcgatcctgcgcgacgagatcgcccaactgatggaggagtcgcaccgctcgaccgaaaacttcggactcgacgtcgaggaaggcgtcccctacgtcatcatggtcgtcggcgtgaacggcgccggcaagaccacgacgatcggcaaactcgcggcccagctcacccgggccggcctcaacgtctatatcggcgctgcggatacgttccgtgcggccgccatcgaccagttggccgtatgggccgaacgggccggcgccacgatgatccgtcaggagatgggctccgatccggcgtcggtggccttcgacaccttgaaatcggccgtggcgaacaaggccgacgtcgtactgatcgacacggcgggccgcctgcacaacaaggtcggcctgatgaacgagctgaccaagatccgcaacgtgatgggcaaggttatccccaacgccccgcaggaggtgatgctggtgctggacggttcgaccggacagaacgccttcgaacaggcccggcaattcacccaggccacgcaggtcacgtcgctcaccatcaccaagctcgacggcacggccaagggcggcgtggtgatcggcatcagcgaccagttccgcattcccgtccgctacatcggcatcggcgaaggcatcgaccagctcaagatgttcgaccgcaaggagttcgtgaacgcccttttcggcagcgaagcaaaataaaatctcccgtgaatgaagaaaattaacgtcatcaccctcgggtgctcgaaaaacacggtcgattcggagcacctgatggcccagctcgcagccgcaggctatacggtcacgcacgacagcgaccgcaccgatgccaaagtcgtggtcatcaacacctgcggcttcatcggcgacgccaaacaggagtcgatcgacatgatcctccgggccgccgccgccaaacagacgggtaaaatcgaacggctgttcgtcgtgggctgcctgagcgagcgttatgcggaggagctgcgtgccgagctgcccgaggtcgatgagttcttcggcgtgaaggattgggacgacatcgttcgggcgctggaggcgactccccggccagcgcttgcgaccgaacgccggctcaccaccccgaaacattacgcttacctgaaaatttccgaaggctgcaactggaagtgcggttattgcgccattcccctgattcgggggccccacgcttcggtgccgatggaaaccctgctggaagaggcccggaagctggccgcaggcggtgtgcgcgaactgatcgtaatcgcacaggacacgacctactacggcctggacctttacggcaaacgacgcctggccgaactgctcgaagccttgtgccgcatcgacggcatccgctggatccggctccactacgcctaccccacggctttccccgacgaggtgatcgaagtgatggcccgcgaacccaaaatctgcaaatacctcgacattcccttccagcatatctccgacgaccagctcgcggccatgcaccgacgccataccaaggcccaggcttacgagctgatcgacaaactgaggcaggccattcccgatctcgcgctgcgcacgaccctgctggtcggctatccgggcgaaaccgaagccgacttcgaagagcttctggaattcgtgcgcacggtacgattcgaacggctgggcgtattcccctattccgaagaggaggggacctattcggcccggaatctgccggacgatgttccggaggaggtcaaacaaagtcgtgtagaacgagtaatggcgcttcagaatgagatctcgctcgaaaacaaccgggcacgtatcggtcagttggagcgggtcatcatcgactcccggcagggggatttctacgtaggacggtcgcaatacgactcgcccgaagtggatcaggagatcctgattccggccgcaggccgcagactgatccgcggttgcttctatcaggtgcggatcaccgcagcggaagactacgacctctacggcgaactcgaaacgaaataaaagacaatcgatcacatctttcaatgtagcgttatccgacagccgcagtatcgaatccgacagtcgctaactcacgacctccggtcgtgtccgcaattcacccctaattcccttcccgggagggaattgggccgctacgcttcccataacgggggacacgaaaggatatgatcatgaaataaaattttgtcgtttgacgttttttatatacctttgggaaggcggaaaatatttccggcgacagataaatggcagagaaaaaggtcataagcgatttcgaggcgcagattcggcagctcattgccgaccatcgtcggcttacggccctttgcaaggaaacagcggcggagcgcgacgtcctgcgtaaagaaaaccgcgatttgcaaatgcaggtaaaagagctcggcaaggagctcgcccgcgtacagctcagccagggactcgcaggaaatgcacccgaccaaagcaaagcgatcgcacgcgtcaaccgtttaatgcgggaggtggacaagtgcatcaccctactcaacaaacccgaccgaatcggcgaagagctgtcgggcaagtaggcaagacatacgataacgaccgaagatatttcatttaacgggaagcaagcgacatggcccagcaacaggcaataaagctcaaaatagccggtaaaagttactcgtttacgctcaagcacgaagcgaacgaggaacagtcgctggcggagaaagaggagctctaccgcctggccgaacgcgaggtgaacgcctatgtcacccggttcgaaaaggccaaatacgaaggattctcgacacaggactgcctggcgatggccgcattgcagttggcgatttcgagcgtttcgctggcccgtagccgcgaagtgggcagcgaagatctccgcaggctggaagcgctgcgcgacgagatcgacgaatacctgaaccgaatcgaaaccgaaaagaaataacagggaaggatacgagggggaccgtatagaaaagtccgcaagtatcatcgttctttaccatacgtttaagaaaaatctacccgcatagattccttaaagctttgcgaaactgaacaatttttacattggggcaactcaccactttcaaaatcaggcttcaacccctcggggtgcaggctgcggcctgccggtagaaggttgcgattttcgggagcccccacacttgactgatcttgcagattcgtcaaacaagttaaggaatactatgcggtttttttatgtacaaaccctaataactaacaaataataactctctaaaacaatgatgacaatcgtactatcgagcgtcctgtccgccgtagtctgcctgggtatttacatcctggtaaccaaatacgttaccaagaagtccatcaaggcactgcgtgaagccgcccggaaagaggcggaagcggaaggcgaaatgataaagaaagagaagattctccaggccaaggagaagttcatccagctcaagagcgagcacgaccgccaggtcaacgaacgcaatcagaagatcgcccagagcgaacagcgggccaagcagatcgaaaacaacctgcaaaaccaacagcgcgaactggaaggcaaggtcaaggagaacgcccgcctcaaagagcagatggaagcgcagcttcagatgctcgaacacaagaaggaggagatcgaccgtctgatgcacgagcagaacacgcgcctcgagcagatttcgggcctgagctccgaagacgccaagagcatcctgatcgaaaatatgaaagcggaagccaaagccgacgctgtagcctacatcaacgaaacgatcgaggaggccaaaatgaccgccacgaaggaggccaagcgaatcatcgtggcttcgatccagcgtgtggcgaccgaaacggccatcgaaaacgccgttacggtgttcaacatcgaaagcgacgaagtcaaaggccgcatcatcggccgcgaaggtcgcaacatccgggcgctggaagctgccacaggcatcgaaatcatcgtggacgacacgcccgaagcgatcatcctgagcgggttcgaccccgtgcgccgcgaaatcgcccgcctggccctgcaccagctcgtcaccgacggacgtatccacccggcccgtatcgaggaggtggtcgccaaggtacagaaacagatcgaagaggagatcgtcgaggtcggcaaacgtaccgcgatcgacctgggtattcacggcctgcatccggagctgatccgcatgatcggcaagatgaaataccgctcctcctacggacagaacctcctgcagcacgcccgtgaaacggccaacctggccggcatcatggctgccgaactggggctcaaccccaaaacggcccgccgcgccggtctgttgcacgacatcggcaaggtgcccgacgacgaacccgaattgccgcacgcaatcatcggtatgaaactcgccgaaaaatacaaggagaagcccgaggtttgcaacgccatcggcgcccaccacgacgaaatcgagatgtcgtcgcttatcgccccgatcatccaggtctgcgatgccatttcgggtgcccgtccgggtgcccgccgagaggtagtcgaaagctacatcaagcgtctgaaggagatggaggacatcgcgctctcctaccccggcgtagtgaagacctatgcgatccaggcaggccgcgagctgcgcgtaatcgtcggtgcagagaaactctccgacatggagtccgaaagcctgtcgcacgacatcgccaagaagatccaggacgaaatgacgtacccaggtcaggtaaaaattaccgtcatccgcgaaacgcgatccgtggcatacgcaaaataggatattaccccgaaaatacgatgtctgtcaatacggacaatccatcggcagtccctccttttcaaaggagggactgcggcataagtaagggcaggtaaaaatcaccgtcatccgcaaaacccgatccgcaacggatctaacgcaacgatactcccaacaccgatcccgatcatactggccgggattttttacgcaaaaatcgatcttttgcgtgcctgccgccccgagcgtctccccgccctccgtccgatgaaaatatcggcaatcatatctttttaatgtgccatttctaacgatcgcagcatcgaatccggcggtcgattattcgcatcccgtagccgtgtctatgcccctgccccaaaatcccctacggggaggagattttgggtgctgcgcactcaaagagatgcacgaaaatatacgatcccgggaatatattacgtatctttgaagagcggaatacctattccgacaaaccatgcagccgtcttgagttgcagcgagcgcaagaaaacgccccaaaacagcgatcatcgcggaggaataatccggtgcagatcgcgattcggaacgacgttattatcgaaaatatatacattatgggaaaaatacgcctccttctactccttgtcctgacaattccctgcatcgcccggggacaaatcaccattcgtcagaccgccatcgtcgaaaaagccgtccttcgtccggagcgtttcgacagcctggaaaatatcgttccgacagagcgtgacaaaacgtataatctgaaaaaatacctcgaacaggaggtctttttcattcccgtcgcgcaaccggtccttcaaaaagccctcgaaggcgagcgcctccttgcggccgcgcaaaaaacactggatagtctatgcgaactccaacaagcctgcacggattccatacgacaattaacgagtaaaggccaaagaatcaacctcttcaggaggaatgacaaaatcgcggaaaaaagtgcagaattacaacagcggtccctctccttaatctaccccatcgaccaacaggaacaaaaaatcaatcgcataaaatacgcctatccctcttattcaccctaccgccgtgcccaacagggcggcttctatcgaagcgactctctgggcaacgcctccggttcggtcgcctactccgaaatcgccaacagatattataccgtcatcgaccttatgacaggatcggtgaacgaccggggagaaggacgcttcacccgggccaaggagcgattctcgcaactcgccttcctgctgaaagaacgcgatgcggacaactacctactctggtatttccgcgatgtcagcgacctgaacaaagaggggaatttcggctatcgcatagacaacgagagctacgacatttacttctcgctcctgagttcctacttcgtcaaggcacgacaactcttcgtgggcaagaacctcctggccagaaacgataaaaccggattcgtggacatcaacaccggcgagattgtccaggtaaacaaaggcagcaaatggcggtgcgaggagttgacgctcatcgaactggaaaacataccggtcctggttcccttttatctgctgaccaacgaagccggcgaaacgatcaagctgccgctgcccccgaaaatcagaaacaaagattacccgacggtcgatttcatcacggaaagccgcgatctttacgacaagcggcaacttcaactccgtgaggagcaacgcagagtcgaagaggaagcccgggaaaaagtccggcaacaggaagaaacggctttccggacggaatgtatccgcaaatacggacaacaactcggcaccctgatcgccgaaggcaaggtaacgctcggcatgagccgggaaatgtgcaccctggcctggggagaacccttccgcaataaccggacaatcgtcgccggaaccgtccacgaacagtgggtatatggctggcacaactatctttatttcgagaacggcaagctggttgccattcaggactgacccgaaaatgaacgagccattgaaaaaacatatcgaacaggcgatcctcccccgttacgaacatttcgaccgtgcccacggacccgaacacgcccggacagtcatcgaacagagtctggcactggcccggcattaccaggtcgatcggcagatggtttacgcaattgcggcctaccacgacgtgggactggagaaaggacgggagatgcaccatatccattcgggggagatcctcgctgcggatacaaaactgcggcagtggttttcgccgcagcagatcgccgtcatgcgtgaggcggtggaagaccaccgcgcctcgtcggaccacgaaccccgcacgatttacggacgcatcgttgccgaagccgaccgttgtatcgacccaccgaccatcgtccgccgcacgatacaatacgggctggcgaactatccggagctggaccgcgaggatcaatatcgccgctgtgtcgatcacctgacacataaatacgcggaaggaggctatctccgactctggatcccggaatcggacaatgccctgcgcctcgcacgactgcgcgagctgatccgcaaccgccaagagcttcggcggcttttcgacgaaatattcgaccgggagatggctgcgaacggctgaaaaaccgagccccatttaccgatgcctttcccggctttataaaatcggaattgcttctcagtataacccgttaccggctccgaccggacgcgcagatctgatgtcggatgcaaaaatcacggatacgacgaaaaaggggcggctcttttgcagagccgccccgaatcatccgatcggacggaaactatttttgctgaatgaacggaagtttcacgacctcggccttcatcagcttctcgcggatcacgatggcgatctgcgtgccgaccttggcgaactccttcttcacgtaacccataccgatcccctgtttcagacagggcgacatcgtacccgaagtcacctggccgatgatatcgccctcaggagaggcgatctggtaaccatgacgcggaataccgcgatcgatcatcttgaaaccgaccagcttgcgggtcaaaccgccggccttctgctcttccatcagtttacggtcgatgaactccttgccatcgacgaacttggtcagccagttcaggcccgcctcgatgggcgaagtcgtatcgtcgatatcattaccgtagaggcagaaacccatctccagacgcaacgtgtcgcgggcaccgaggccgatgttcttcagcccctccttcgacccctcctgccagagagccttccagagtttctcaccgtcttcgttggccacatagatctcgcagccgcccgcaccggtgtatcccgtaatcgaaagaatcgcatccacaccggcaaccttcagcttcttgaacgtatagtattccatatcctccaccggctcggtgcacagcttctgcacgatcttcatcgcattgggaccctggatcgccagttggcagatctcgtccgaagcgttgtagagctgcttgccatgaccggcctccaagccgaatttcttgccctcttcgacgatatggttccaatccttgtcgatattggccgcattgattacgagcagataagtttcggcatcgatccggtaaaccagcaggtcgtccacgatacctcccttgccgttgggcatggtggtatattgcaccttcccgtcgtaaagcgccgcaacatcgttggtcgtgatatgctgcaggaacgcttcggccttgggaccttttacccagacctcgcccatgtgactcacgtcgaatacgcccgcgttgttgcgcacggccaggtgctcttcgttgatgcccgtaaattcgatcggcatgttgtaacctgcgaactcggccatcttagcgccgttcgcaatgtgatgtttggtaaaaaccgttgttttcattgtctgttatcgatttaattatcagttatttgattatcagtcttattcgcggagcttcacgcccatccggggacagcggtgaaactccttcgtgcggtcgaacaggtagcggtaggtcgtatgcatcttgtgcttggtggcgcatacgtaactctccatcatgcgcatcatcaccggattgaaatcgccgatccacgcaagttccaatgatttgtagggcaacttcggaacctccttctcgaaggcacgaatgattcccgcctcgatgcccttaccgtggaactcgggggtgactccgaaaatcaggccgaagatccggtcggccttatgcgcaaccttgagcgcccacatcagacgcagcttgttccaccagccgaacttgccgttgaaggaaccgatcacccggttcagatcgggcaccatgatgaaaaagccgatgggttcgtcgttatagtaagcgaaatagatcaaccgttcgtcgataatcggacgcagcgtattcataatgcggaacgcctgttcgcggtccatcgccttcacgcccgaaaacagcgcccacgccttgttataaaccagccggaaatcctcggccacctgctcgagattctttttcgagatatgcttgaaacagtaaccaggactctcctccagacgcttcacacgctcgtaaaccgaatcgctcaactgccccacctccaaccgacgcagataggtatgctggttgaagtagttctggaatccgtaattttcgaacaactctttataataaggcggattgtacgtgttctcatagaggggctgaaattcgtacccgctgaccaacagcccccaccaggaatcccggggaccgaaattgatcggaccgtccatcgcctccataccccggctggaaagccacatgcgggccgcatcgaaaagctgatcggccagctcttggtcgttgatagcctcgaaaaagccgcaccctcccgtcggctgctcctccaggaaagcatgttcccggtcgtaaaaagcggcgatacgtcccaccacttctccttttttatcgcgtgcgatccagcgaatggcttcgccatcggagaacatctcgtttttcttcggatcgaaaacagcctggatcgaaggatcgaggggacatacccagttacgattccccttatagattttccgaggcagatcgaggaactcccgctccgtacgggcatcgacgacctcctgcaaaacatacttgtctgaactcattgccttaaaaataaggtttaatcccaacaaagataacgatatttttccaaaatccccgttcacaggccccaatccgtgcgaaaactttttccatatagtataacgcaagaatccgggacagggaaactctccgatttcgattattcggacaaacggaatcgctttgtacgaaaaagtaatcttttcgtgcaaaataaattacaatctataagaataaatactatctttgcatcaacattaaaccacaacttaatttcaatatattatgaatgttaacaatttaatggcagaattggagcgtaagcacccgggtgaaaacgaatacctgcaggccgtacgcgaagtactcgagtccatcgaggaagtttacaaccaacatcctgagttcgagaaagccaagatcgttgagcgcctcgtagagccggatcgtatcttcaccttccgcgtaacgtgggtggacgacaaaggcgaagttcagaccaacctgggctaccgcgttcagttcaacagcgcgatcggtccttacaaaggcggtctgcgtttccacaaggccgtgaacccttcgatgctgaagttcctcggtttcgagcagactttcaagaacgccctgacgacccttccgatgggtggtgcaaagggtggttcggacttcgatccgaccggcaagtcgaacgctgaaatcatgcgtttctgccaggctttcatgcttgaattgtggcacaatatcggtgtcgataccgacgttcccgccggcgacgtaggcgtaggcggtcgtgagatcggcttcctgaacggtatgtatcagaaactggctcgcaagtaccacaccggcgttcttaccggcaagggcgaaacttggggcggttcgatcctccgtccggaggctaccggtttcggcgcactctatttcgtacagcacatgctgcacctggccggcaagaaactggaaggcgctaagatcgccatctcgggcttcggtaacgtggcttggggtgcatcgaagaaggctaccgaactgggcgccaaagtgatcgcaatctccggtcccgacggtgtagtaacgatccccaacggtatgaacgaggagatgatcgactacatgctcgaactccgcgcttcgaaccgcaatatcgtggctccgttcgcagagaaattcgcaggtacgaccttcactccgggcaagaaggcttggagcgtgaagtgcgacatcgcactcccctgcgcattccagaacgagctgaacggcgacgatgcagccgaactgctgaagaacggcacttggtgctgcgccgaggtttcgaacatgggttgcacgccggaagctatccacgcattccagaaggcaggtatcctgttcgcaccgggcaaggcagtcaatgccggcggtgtagctacttcgggtcttgagatgacgcagaactgcatgcacatctcctggtcgggcaaagaggtggacgagaaactccacttcatcatggcaagcatccacgacgcttgcgtgaagttcggcaagcagaaggacggtcacatcgactacgtgaagggtgccaacatcgcaggcttcatgaaagtcgctcaggcaatgctcgagcagggtgtattgtaatcctgttcctctcatacgaaaagaggtgcggccttcggtcgcacctctttcattttatccgtttcgaagaatcgcggacgagttagaaggcgatattcgccgacaggcccaaggtcagcgtattaaggtgctgacgactcccgcaagccatcggaggttgcagatagtaagtagtctgaaatcgaagatcgaggttgtaattggcccgaaacgtcatagaggtacctactccgaaaacgggtcctccatggcctcccagcgtatatccgtccaaggaaaaagattcataatactgatatccggccaaaaccttgccaccggtccgccaacgcgcggtaatcggatatgaaaaataggccccggcacttgcggaccaactgtccagacggtccgtagattcggcaacattcaacttgatcggcacactcgacacggccgtacgtcctccgaaaccgacataaggattcataaaccaagccccctcgatgcccaggttcacacctgcattgaactcgccttcgactcccgcaacaggacgataccgtcctatcaccacatccgtacttacttccataccgagaaacgacggccggcaataccgatcgaaagcaaaatcctgctcgaattccgtcaatcccctctccttgaaaatcaaatcggcgaacaggtatcccagctctacggaaagaataccgatccccgcacctactaatacatcgctgaaccaatgtttattgttgagcatgcgcgaaacacccgttaccgtagccatcgaatagccggcgatactgtaccagggactgcgaggcccgtactccttatgaagcatcgtagctgccataaaagccgtagccgtatgccccgacggaaacgacttgttgttcgatccgtcggggcggggcatacggcaggtatatttcagagagttgaccgctccggccatcagcgcgacggaaaaggcatccgacaccaacatccggccccacgaactgcgcccccggactcctccgattttcagccccagcatcaacgctgcgggagcatattgcagataatcgtcataatggagacggaaagacggtacataatcgttcctcaaatgacgaaatccccgatcccgctcctgcacgaccaaacctgcgacaataaggggaactccgatataggttattcgataggcacgcgaagaggttatccgctccatatcccggacaaacgggctgcggcggagggggggggtaatcggactcaatgtatcgacctgggcgaaagcgccgatcgacacccccagcagaaggcacagcaacagcaatttcttcatttaccaaatacaagattccgaccgcatcggaaaaacctgttctcaccgcttaccgacagccgggacggggacggatgcggcggcggatactccgcacgacatcgcccagaatagcgatcagagaggtatagccgatcacttcgagccattgtacccacgtgagcggcgtggtacggaataccggacctccgaactccacgatcaacacctgtccgacggcaatcaacagcagcaccaggaagaacgtacggcttccccgcagatcgtgcagcaccgaatgacacgcttcgaaacctttggcattgaacatattccagaactgaaggaagacaaatacggagaagaaaacagtcagttgttcaaggttgggcgcccctgtcgtggcacgccagtagaacagcataccgagcaatacgccgacgaaaatcgttccgcaggtaaagatcgtccgggccatggccggcgtgatgataaactcgtctttgggacgcggcggttcgttcatcaccgcaggattgggcggcagggaagccatcgccagcgcagcgaaagtatccataatgatattgacccacagaatctgcactaccgtaagcggcatctcggtcccgaaaatcgaacctacgaaaaccacgatgatcgccgcgaaattgatcgtcagttgaaacagaacgaagcgttggatgttgcggtagagcgagcggccccacatcacggcagcagcgatcgacgcgaacgaatcgtcgagcagcgtgatatcgctggcatccttcgccaccgacgtacccgatcccatcgagagtcccacgttggcgaagttcagcgccggggcatcgttcgtaccgtcacccgttaccgccacgatttcgcccttgcgctgcaaaagacgcacgagccgctgcttgtcgagcggtcgcgcccgggacataatcttcagagcctgcacccgttcgagcagctcctcgtcactcatcgccgcgaactccacgcccgtcatctcgttccgcgaggagtcggtttcatcgtgccataaaccgatgcggcgtgcgatctcgcgggccgtggccggagtatcgcccgtgacgatcttaatatcgatcccggccttcatacaacgggctacggcagccgggacatcatcccgtaccggatcggcgatcgccgccacggccacgaacagcaactgcggattccgcagcgcgtcttcgcatcgttcggccgtcgtttcggcatacgccaccgccagcgtacgcatcgcacgtccctggaacagcagcaactgttcgttcacctgggcatccttgccatccggcatacacatcgcccgcacgatttcgggagcacccttcacgcaaatcaaacgctttccggtagttttgctctgtataatcgtcgccatatatttgcgttcggtggtgaaggtcatacgatcgacgatcggcgcctcctcacgcaaagccgcatagtcgaatccctcttcccgcaggcggatcagcagggccccttcggtcggattgccgatgacatttccgtcggcatcgagaaaagcggtcgaattgacggcgatgatctccgccagcaaccgttcgtcaatggaggcataatgaatgatctcctccacccgcatccggttttgagtgagcgtacccgtcttatcggtgcagatcaccgtaacggcccccatcgtttcgcaggcgtgcatcttgcgcaccaggttattcgtcttcaacatccgacgcatcgacaacgccagcgagagcgtgatgctcatcggcagcccctcgggaacagccatcacgatcagagccaccgaaaccataaaaatacgcagcagctccttggaagtctggacccaatcgcccgtcgaaagctcgccgcccatgtatgccttggcgagcatcgccaagaagatcgcgatcgacaccgcgataccgatcttgccgatcatccgcgaaagacgcgtcaactgcttgtacagcggtgtaggctcctcgctggctatggacgactgctcggttacccgtcccgcctcggtgcggtcgcccacagcttcgacgatcatctcgccgtaaccgtccacgacagtcgtaccgcgcaacaacgcatcggaaggataggtcgcttcggcatcgaaaaagcgttcgtcggtagtcttgtccacctcaggctcgcccgtcagcgtcgattcattgatcttgagcgatacggccttcaccagcttaccgtccgccgggaccgtttcgccattctcgacatacaccaggtcgcccacgaccacatcgcgtcggggcacctcggtcatctccccgtcgcggacgaccttgaccggaatgtcgtcattcaccagattgagccgcttgaaccgccgcatggcgtccaattcgaagaaaaagccgacacaagtggccaaaacgatggcgcagataattccgatggtttccaggaactccccatcgataaaagccatcgccagcgacagcagcgccgctaccagcaatacctgaataatcggatcgcggaacttctcggcaaacagtttccaggccgaatcccccttgcggggcgtgatgagattatccccatgcagacggcggctctcctccacctgggcggaagtcaaacctctgtgttgatgttctttcataaagtcagtcggatatataaataaggttgtgaatgttatcgaaaagaatattgccgggtcgaggcatccagccggaccgcaatgaacaacatgatggtaaaagccatgagcgacgaaccaccgtagctgaccaacggcaggggaattcccatcaccggcatcagtccgatggtcatccccacattaacgagcagatgaaaaagcaggaatgccgcaacgcagtaacagtagatccgtccgaaaggctcctcctgccgttcgcccatacgcatcaaccggaatatcaacaggcaaaagagcgtcagcagaagcatagcgcccagaaatccccactcctcgccgatggtactgaaaatgaaatcggtatgtttctccggcacgaaaccgtatttgatctgggtcccttgcaggaaccctttgccgatccagccgcccgaaccgatagcgatcttggcctgattgacgttataatccgtaccgaggggatcactgaccagccccaggaaacttaaaatacggttctgctgatgctctttgaggatggaattgaaaatataatcggtagtcggaacgaaaagcattgccgtcagaaacagtccgatcgtaatgaaaatattgcgcagattggcgcggaaggcataaatcgccacaaagatgagcgacagcagcgtcaccacgagcaggcagcggtagagatccatcgctccgggtgccgccaacagcatcccgaaatagagaagcagcgtgcccaatgccagcgcagccagataaaccatgcgggaccgccactgtccgttcatcatcgcctcggaaagcgtacagaccagaatcagcatcaccaacagggtcagcggcgtaaagaggaacgaaaaaataaagagtacggcgatcaggatcaccggaatacagagccacttgttcaaaccttcgcggtacaacacgaacagcagcgatacgagcacgatacccgatcctgtatcgttctgcatgacgataatcaacagcggcagacagatcaccaatcccaccttgaaaagatcccccgcccggttgatcgaaaacgagctggagctcatcacgcgggccagcgccagcgccgtagcgattttggcgaactccaccggctgaatacggaccgacccgatctcgaaccaggccttcgcaccgttcacttcacgaccgaacagcagagcggctaccagggtcagcaatcccaggacatagaacagataagcccacttgtgatagatgctcgcatcgaccagcaacacgacgaccgctacggcgaacgatattcccatccagacgagctgtttcatatagaaatgcgagaaggaaaaaatgctctccgccccctcttcgtacgaagcggagaggatagccacgaagccgaccagcacgatcagcacatagatcagcactgtccagcgatcgacgccctcgaacaatttaccgatgccgttattttccataggccgggtaataaatcgttttctgcttgaccatctccaccagccagggccgtgtgacggtgtcggtcaaatagtactcttcgagcagactggcgatgggcaaagcggccgaagccccgaacccgccgttctcgacatacaccgaaatagcgatgcggggattgtccttcggagcgaacgacaggaaggtcgaatgatccttgcctcgaggattctgcgccgtacccgtcttgccgcacacgtccagacccggcagataagccgtccgggaggttccgccctccttgtgcacgctctgccacataccctccacgattggttcgaaatatttcggatcgactttcgtataatgtttctcgtaaaaccgccggtccatcgaatcccgcccctctaccgaacggacgatgtgcgggatataatagtacccgcgattagcgacgatagccgccaggttagccatttgcagcggcgtacactccagctccccctgaccgatcgagagcgacagcaccgtcagcgcgttccacgatttccgataacgcctgtcgtaaaacttccggtcgggaacatagccgtttccctcgcccagaaaatccgaatccagcttgcggccgaagccgaaactctcgacatactccctccatacgtcgaacccctccttgacgcttccgtaccggggattttcgagaatatcgcggaatacgtaacagaaataggcgttgcacgaagtcgctatggcaaaacgcaggtccgcaggcgacgtatgggcgtgacacctcatcttgagccgtccgacctgataaccctcgtgacagggataacgcatggaaggagtcagcacaccctcctgcatcccgatcaggccctgaaccagtttgaaggtcgaaccgggcggataacggccgcttacggcacggttgaacagcggctgccgtttgttatagagcagctccatatagtgattgccccgctgccgtcccaccagttcatcgggatcgtacgtgggcgaggaaaccatcatcagaatctcgcccgtcgaaggttcgatcgccacggccgccccgactttgccggccatcagctcctcggcgaagagctgcaaccgcgcatcgatcgtacagacgatcgacttgccgggtacgggcagcgaatcgaaacgaccgtccatatacgaacccttgatcgctccgtgcgtatccacctcggagatcttcacccccttcttaccgcgcagctccggctcgtaagccgactccacaccgctgattccgacgtattcgcccgcctgatacgaaggataacgccgtaacatttcggaattgacctcccccacatatcccagcaggtttccccctactttacgagggtattgccgggcagtccggtaaacggtatagaagccggcgaagttacactcgtcgaaacgaagtttgtcctccttggacatatagttcatcaccatacggggcgcacgcggacgcacacgggcattggccagctccctcacaagcccttcgtgcgaaagacccgtaacctgacagaaaagcgtcgtatcgaacccttcccgatccatctcgcgatagatcaccatcaagtcataacactcgcgactctgtaccagatattcgccgttgcggtcgaacacctcgccacgggacggatactgaacttcgtagcgcaacgcattgccccgggccagctcctcatatttgctgtcgatgagctgaatataagcaagccgcgcggcgattacgccgaaaacgatcagcacgaccacctgcagcacccgcatccgggcaaccccttccccaccgtaactcatagccgaaccgtcagtttagtggtgaacagccgcgcaagcagccagatgaagcccaccgtaacagcactgctcacgaccagtcggacgagcgtatggaacaactgcgcccaagacagggactccaacatgaaaaacaggaagtgatgtaccacgaccatcgctgccaggtagcgcagaaatccgccctgccccaaccggatcgaagaaggaataccaccctcccgaatcccctccttaccgcagacagactgcagaagcggccggcgcagcatagcgaccggaagcgtagcgatcgtattgatccccgctgcccccatcgcccaatccatcgcaacggacatcgacaaagccagaaaaagcactgcaaccggcggagcgtcgatcggcagcaggacaatgaagccgatatagaccaaagggcagaggtagatactgatcgacaggttgtcgaacagaaaaatctgcaacagggccaaaataaggaataagacgatatagggaacagtccggtacatatttatcttctgttttgccgctcggcttcggcttcgagctcctgcacatcttcgatatcccggttgcgcaccaggataacatccgtcagttgcgacacatccaccgccagccggatcaccacgtcgtaagccatctgggtatcggccagcgaaaaactctccacatagccgatcagcacgtcagccggaaaatactgcgaaaaaccggaggaaaccacctcttccccctccgtaacgcgggcatatttggacaattccttcatgcggacgtggtagcgatcgtcacccgcccagtagatcgagccgaaatagtcgtcgccggcgagcttgccgctggcattgaacgacgtattgagaatcgacaccgccaccgcatgacggtcggaactggcggccacgtagccgaccatggccccttccggagagagcacgcccatccccttctcgacgccgtcgcgttcgccccggtccagcacgatgaagttacggttcttgttgatcgaattggaaatcacccgggcgacggtcagctcgtagggcttctctcccatatcgtgcagcaggtccgtacgcaccgaatcggccgccgacctccggtaaaaagccaactcctcctcgagtacggcgacacgctccagcaggcgttcgttttcgcgccccagggtaaaataggagcgaatgtctgcgaagatgccgttcaccccgccaaccacctggttcgagcgggtgagcagcttggcctgcgtataattcgaagagtgcgcataatacccgatggcgatcgcttcgaatacgacgaacaagaccgccacgtagattctgcgcaggaattcgatcagtttatacacggctcacgggaaagcttccgcagcttcgttatttcatcaggaacgagaaacggttgatattcttcagcgcgatacccgtaccgcgcgcaatagcacgcaagggatcctcggccacgtggaacggaatacccgtcttggcattcagacgcttgtccagccccttgataagcgcaccgccgccggccaggtagatgccgttcttcacgatgtcggcatacagctccggcggcatggtttcgagcaccttcatcagcgccgcatccagcttgacgagcgacttctccagtgcataggcgatttcaccgtagctgagcgacacggtctgcggcagggcggtaagcatattaggacccgttaccacgtaatcctcgggctcttcgtccagctcggtgagcgccgcaccgatcgaacacttgatcgcctcggccgtgcgttcgccgatacggatgttgtgctgctggcgcacgtaactctgaatatcgttggtaaagacatcgcccgcgacattgatcgactcggagcaaacgatgccgccgagcgaaatgcaggcgatctcggtagtaccgccgcctatgtcgatcaccatgttgccctccggtgcttcgacatccagaccggcacccagcgccgcagccatcggttcgtaaatcatatagacctcacgccccccggcatgttcggcggaatcccgcacggcacggatctcgacattggtcgagccggaaggaatgcagatcaccatgcggatcgagggagcgaagagattgcccgaagtcttgactttcttgatcatgccgcgcagcatcaactccgtagcgttgaaatcggcgatcacgccgtccttcagcggacggatcgtcttgatgttcggattggtcttctcgtgcatctggcgggcctgcgtaccgatagccaccagtttaccggtgtgtacgtccaacgccacgatggaaggctcgtccaccacgaccttcccgttgtgaataatcaaagtattggccgtacccaagtcgatagccagctcctgtgtcagtgaaaaaagtcccatagtactctgctttcctctctctatattataatctattaatttctgataatcaaaatattgactttctttcccagaagccttcgcctgcccgtgaaatccgtgtcaatacatcaggaacaaaggtaatgaaaatgaaagcagaataaaacaaattcgtttgttttttctgccgagtgcgtcttactttctacaaaggtagggaaaagaaggataattatgtgtcctttcccgttttttatttacttttgtagaaaagaaacttttattccgaaaacttatggaccacaagataggcagcggcgccagatgcgccatgatcggatacggaagctgggccacggcgctcgccaaggtattgaccgaaaacgaaccctcgataggttggtacgtccgcaatccggaggtgctcgaaagcctgcgcgacaagggtcgcaatccccgctatttgagcaacgtacggttcgaccgcacgcgcataaacccctcggacgatctcgaccgggtggtttccgaggccgacatcgtcatcctggccagcccctcggcctacctgaaaaagacgctcgaaacgctgaccgttccgctcaaggagaaattcgtcatctcggccatcaaaggcatcgtcccggacgactacaccaccgtcgtggagtatatgcacgaccattacgacctctctttcaagcaactgggcatcatcaccggtccctcccatgccgaagaggtttcgctcgaacggctctcctaccttacggtggtttgcaccgatccggaaaattcgcatacgatcggacacaaattcgccaccgaatatatcaaactctcctattcgaccgacctgtacggcatcgaatatgctactatcttaaaaaacatctacgccgtagccgtcggcatggctgtcggattgggttacggggacaatttcctcgcggtgctgatctccaacagtgcgatggaaatggcccggttcctgcgggaaagctaccccgaccagcgcgaaacccgcgcctcggcctacctgggcgacctgctggtgacctgctattccgtttacagccgcaaccgcaaactgggcctgctgatcgggcacggctgcacggtccgcgatgctttggacgaaatgacccaggtggccgaaggctatttcgccgccgactgcatccgtcacatcaacgcccgccacaaggtgcagatgcccattgccgatatggtctatgaagtcctttacaaaggggttcctgttcgggaagccatgcaggagcttacgacaaaactgatttaacaccaatacagtcatgaaaaccctgtcgttcgatcccattcgcgccgatgtcgcaatcaccgagaaggaaaaatccgcagccctgcacgccaacgcgctgctgcacaacggccaaggtgccggcaacgatttcctgggctgggtggggctcccctccgccctcggcgaagaggagttgcaggcgatcgaaaccgaagccgcccgtctgcgcgacctggcggaggtgatcctctgcatcggcatcggcggatcctacctgggtgcacgcgccgtctatgaggcgttgagcgacccgtttaacctgctacacgaacatccggcgaaacccattctgcttttcgccggacagaacctatcggaagactatctggcccgtctgctcgcagccgtcgaaaaccggtcgatcgcggccatcgtgatctccaagtcgggcaccacgaccgagccggccattgccttccggctgatccgcgacgaaatcgaacgccgctacggacgcaaggaggcagcccggcgcatcgtcgccgttacggaccgcagccggggggcgttgaaaaccctcgcggaccgcgaaggctaccgcactttcgtcattccggacgatgtgggcggacgttactcggttctgaccccggtgggtctgctgccgctcgcggcggcgggaatcgacattcgctccctactggccggtgcatgcgaaatggaacgggcgacggccgacggagtcccgttcgacgaaaatcccgcagctcgttatgccgccgtacggaatatcctctaccggcagggattcatgatcgaaatactcgcctcctacgaaccgcaactacaatatctggccgaatggtggaaacaactcttcggcgagagcgaaggcaagcagggaaggggaatcttcccggccagcgtcaccttcacggccgacctgcactcgatggggcaatacattcaggagggagagcggacgctgttcgaaacggtcgtctccgtcgccgccccggagcaccgggtgaagatcggcagcgacccggacaacctcgacggactcaacttcctgacaggcaagcgcctttcggaaatcaaccatacggccgaactgggcgtgagcctggcccatgcagacgggggcgtccccaacctgcggatcgaaattccccgcatcgacgcccgcagcctcggcaccctgatctatttcttcgaaaaagcatgcggcatcagcggttacctgctgggagtgaaccccttcgaccaaccgggagtcgaggcttataaaaagaatatgttcgccctgctgggcaagcccggctacgaagaggaggccgaaaaactacgccggaaactgtaatcccctcggctgctgcgaccggcgaacacaagaggatccgacattcagaccgaataaaacaggagtaaaaatctttgtgatttttactcctgttttttgtaaaacgacaactatccaatcaaaagtccattgccggaaaccacctcctactcaagacatttttttagaataattccaaatgccgcaatccaaagacaaacaccgaaaaatatataccagtacggatgcggggcacacaactcttgggcccaatctccctgttttttataatatccatattgagaatagaacatcaaaaaaaacatgattccaaaaaggtacaagaaaaaatcatcgtgctgattttccgattcaaatcgcttgttataataaaataaaataaggactgcattgcacagtccttattttgtcgaatatgaatcccgtatgacttacagaatccgtacgccttcggcgctgcgtaccatcacagagttgatgacctcatccggaatgatgccgtaaacgaatgtcagcttgtaagtgctgtcgtccgcagccgtcattaccatcgtttcgccgacaccgctcatctccccggtttcttgattgagctggccgaaaagccagtccacactggatacggtatagtcgtatgcccaattctcgccgtcggaatatttaccggtaagtttcttggaagtttcgtcgaaagtataggtacccgtcatcttcacgaacccgttcgagctgacgtcctgatacatttcgaaattcttctcctcgtcgaaaacgatataaacctccttcgggaaattcgtatcgtcgccgcctacctcccatttggtcatatgccagccgtaaacatcgacaggcttgggatcaggaggggtaggaggagtagtttcctcgttgtcactgcaaccgaccagcgccactccgaaaagcgccactgccaataaactaatcaatcttttcatatttcaattatcaggttatacccgtctgaaaccggacagaatcaatttcacaacacgcaaatataatcaatcgaacgctatttccaaaattttcacgtcggaaatccgaaaaaagccggaaaggaggcccgttttcatcgaaattatcgcagcgctccgcccgacatcggacttacagcacatccaccaggccgtgtctgacggcataaaccaccaggctcgccgtatttttacatccggtcttctccagaatattggcccggtgcttgtccaccgtgcgcttcgaaatgaacagttcgtcggcgatctcctggttcgacagcccgcggcacacgcagaccagaatctcgatctcccgggtcgaaaggcgctcgtcggatccttcgtacccggacactgcggtctgcatccggctggcgagcgaccgcagcacctcctcgcagaaataggtgcctccggccgccaccgtttcgatcgcccgcaacacttcgtccatcggggaatccttcatcagaaaccccttggccccggcctgaaccatccgcgagtagtaattctcatccccgaacatcgaaagggtaatgaccttgagtccgggctccagagccaacgctttctccgtcgtttccgccccgttcataccgggcatggcgaagtccatgaagaccacgtcggcctccgtcgcgggcagcatcgccagaaattcctctccggtcgaagcctctcccacgacccgaattccgtcgtaccggtcgagcagtccccgcatcccgctgcggaacagcgagtgatcgtccaccaatataattctgcaaagttccatcgttacagtttttccgccgactcagcctgggtgctgacccggattttcgcctgcataccgacgcctttggcactcgtgatgtcgaaccgcccgttcagggagttgatacgcgaagcgatgttcgacaaccccatgccgcaatcggtcacggcggcagggttgaacccgcgtccgttgtccgtatagtcgagcgcgagcgtatcgccgctcttggagagcgaaaggttgatctccgtacaccccgaatgtttgagcgaattattcaccagttcgcaaacgacacgatagagaatcacctcgacgtcggtatcatagcgctccgagcgaaggttggtcgtgaagcggatcttcacgtcgtgcatcgccgaactctttcccacgaagttctggatgccccgcgccaggccgaaatcgttgagcacatgcggcgaaaggttgttcgaaatctcccgcagcgagcggatcgcctcgtcgatcacataggtcgtattaccgatgatctcctgctgatcggccggcagcgactcccgttgcagggccgacagcgacatacgggccgacgagagcaacggccccagcccgtcgtgcaaatccttcgcgaaacgcgaccgcgatttctcctcggtgcgcagcacggccgtcaggatgcgcttgttgagcaactgccgctggcgattgagccgggcgatgtacttgaaaagcttatgggcatacatcacgccgatcgacatactgatcgaaatgaccagtcccaaccagacgaacacctcataaggcaacgtctgaccgttggcacgcaggaactgtacgacccgttcgacggaaaggagcgtgaatccgatggtgaacagaatccagatcgaattgtacttggtcgtacggatcaaacggatggcgaacagagtcgcgatcgtctggatgacgatggccacgatgagtaaaattttgatcagcatattgaatattccgctaaaattcgaattcttccgctccgacgcaccggcccgaaccgcttcccgtcttcacgaatacaaatataagaaaagacgggagtaattgaaaatttattttcggacagccggttcaaacaccctctattcaccccgaaacgaacgaaaatcgcctcggcacatccctgcggttccggcatattccgacttcggaccgaaatccggaattacgccccgggcagcttccgtcgcaaaacaggatcgcccaatctccggcacctgcctccggtccgatgaatcctatccgagtatccgctccagcggaaccatctgcgcatagtcggtcatatccgtctgcacgggaaccaccgaaacatagccgttcgccaatgcccactcgtccgtatcggtcgattcgggttcgctattgacgaacgcacccgtcagccagaaatactcccggccccgaggatcgtggcgacggaaaaactcctcgcgccaataccctttgttctggcggcacacccgaatacccttcaccgcttcgggccgtcccttgggtatattgacattcagacagaacggcgtggggggattggcctcgaccaccgcacgcacgatgcgctcgctgtaaatcttcgcggcttcgaaatccgcctccagactgtgatcgtccagcgaaagcccgatggcaggacaaccgtagaaactgctctcgatcgcaccgcccatcgtacccgaatagaggatattggccgccgaattcgagccgtgattgatccccgaaagcgccagatcgaccttgcggcccttgagaaagtagtcgaaagcgatcttcacgcaatcgaccggggttcccgaaaaagcataaacctccacgccgtcgcctttcgacacttcgcgcaggaaaagcggattattgatcgttatcgcctgactcataccgctctgcggcgtttcgggcgcaatggcgaccacccggccgaacttgcgtgcgacctcgaggagcgcctgaatacctcttgaattgtaaccgtcgtcgttggtgacgaataccaacttctctttcatcatatttttctccgattttagtgacaaatatacgaaaaggcgggcgacattcgtcgaactcattcgaaaagaatgtccgaaccgcctcccatattccatacaacatacatacttccttccctgcacccgggaaattccccgcatgccgatcccgtcggaaaattccattgtaaacaaaaaggatcggaacgggaagttgcagactaaccgcaaaccatgtgcctcaaagttcgagagccatccatacgcaccgcccgtcgaagcaatccgcacctcccgacacgattcaagatgaaacccgttcacctcccacacccgccgcagccgacatcgccgcacaaccggtccggttgcggagtcatctattttttagacagccgattgcccgtttgggaaaaagtttctatatttgcggaccgtatcaacctcttatattgggtgcgaagccacgaccgggaacatcaatccgttgattcccggaggattgcagagcaagatccctgcatggtaggcaaacacagcgataatgttgaacgcagaaatcatcaaaaaaattgttgcaacaatgaacaaggatgcagtaatccggctcgtcaacgagcagatgtggaccaagacggatgttccgtcgttccaggccggtgatacgatcaccgttacgtacaagatcgtcgaaggtaacaaggagcgcctgcagagcttccgcggcgtagttatccagatcaagggtacgggcaagaccaagatgttcacgatccgcaagatctccaacggcatcggcgtcgagcgtatcttccccctctattcgccccacatcgagagcatcgaggtaaacaagcagggcgtggttcgtcgcgcacgcatctactacctgcgtaacctgacgggtaagaaagcccgtatcaaggagaagagagccgcttctacgaagtagatccttccgcctgcaagaaaaaagcctccgttcgagcggaggcttttttctttaacacgaatcttcacaacgccgatacccgcaccagctaaaaaaacgctattccggccgggcaaacatctcgtccgtcaccgggtagtcgatttcgaaaccccggataataacttttcccaacttccgacagacaagacaaagatcgagttgcggcccgccttcccgcgaccgaccgaagagccgcatatccctgccaatacccggccgtcggccgtccgcactacggacgatcccgaaacgttccgaataaattcgttgcctccgaaaagcaaaaaggttgcaaacgaatatcgtttgcaacccagccgacctcccggtcgtttgcggagagaaggggattcgaacccctgatacgctttagacgtatacgagctttccaggcgcgcctcttcaaccactcgagcacctctcctcggatgggcaaagataatgatttttccggcaatcggccaaatttcgctcctactaattcaccgtccggcacgatattttccggccactgtcggcaaaagacgctcccgcatgcttcagaacccgggcgaaacggcatccattccccctggctcccgcccattcgccgtcaggcaaaaggccgcgtgccttatagccgaagaacggcctacacggacccgacgagaacgatccctacccaaaaacgaatctccaggcgcaaacggtataacgccgtcgcacccgctacttgtccgcaaccatctgcttccactccggatgccgcagaatataacgggccatgaatcgacacagcggaaccactttcagcccctgccgtttcaaatcttccaacaccgccagcgtcaactgcgaggcgataccctgtccgcagaaccgatcgggaacgcccgtatgggtaacggcgatacacccgggaccgcactcctcgtaatccaccgctgccgtagcaccgcccaaatcgaattcataacgtccgagcgccttattattcttcaattcatactttttcataaccatcgaatattgattgtatgcaaagaagaacaaaatccgcaccgcaacccacatttcgggaaagaaaaaaccggaccgggcgatttgcccggtccggtatcgcaatccgcacgaatcggctacgccttgccggccgatccgagaactttctcgcatttgtgcatgtagagcttcttcatctcctcgcgggccggccccaggtatttgcggggatcgaactctgcgggtttgtcggtcagcaccagacgcacggcggccgtcatggccagacggctgtccgagtcgatgttgatcttgcaaacggcgctcttggcggcacggcgcagctgctcctccggaatgccgatggcatccttcaacgcaccgccgtgcgtattgatgatatgcacgtactcctgcggcacggacgaggagccgtgcagcacgatcgggaacccagggatgcgcttctcgatctcctccaggatgtcgaaacggagttcgggcggcacgagcacgccgtccgcattgcgcgtgcactgctcgggcttgaacttattggctccgtgcgacgtgccgatcgagatggccagcgaatccacaccggtcttcttcacgaaatcctccacgtcctcgggacgggtgtaggtatggtgttcggccgaaacctcgtcctcgacaccggccagcacacccagctcgccctccaccgtcacatcgtgcttgtgggcatactccacgaccttcttcgtcagcgccacgttctcatcgtaaggcaggtgcgaaccgtcgatcatcaccgacgagaaacccatatcgacgcaatccttgcaaagctcgaaggtatcgccgtgatccagatgcaacacgatcggaatgttcttgcccaactccttggcatactccacggcaccctgggccatgtagcgcagaatggtcggattggcatacttgcgggcacccgacgacacctgcataatcacgggcgacgaagtttcgacgcacgcctgcacgatggcctgcatctgctccatgttattgaaattgaaagcgggaatggcatacccacccttgatcgccttggcaaacatctcgcgggtattcaccaggcccagttctttataagataccataattatataataatttaagaatttatgcgttcctatctttacaaaattaagcattatttccttaataacaggctctttcccgaataaaaatcaggcgggagaaaaaatagcgctcaaacggaatattctgattttattttagtaaatttgcgaataattggcaatttttctaacgctacaataaagacctcaacaccatgtcggaattcatctatcaagaaccattcccgatcgaatgtgacaagacgcaatatcgtctgctgaccaaagagtatgtcaagatcgtcgaatgcgacggacgccgcattctcaaggtcgatcccaaaggtatcgaactgctggcccgcgaagcctataccgacgtatcgttctacctgcgcccggcccatctggagcaactccgccacattctggaggatccggaagcttccgacaacgataaattcgtggcctacaccatgctgctcaaccagacggtcgccgccgaaggcgaactgccgacctgccaggacaccggcacggccatctgcatcggcaagaagggcgagaatgtctttacgggagcggacgacgccgaatgtatcgcccggggcgcctacgaagcctacaaggagcgcaacctgcgctattcgcaggtggtgcccttcacgatgaccgaggagaagaactcgggcacgaacctgcccgcacagatcgatctctacgccgacaaaggcaacgaatacaaattcctgttcatcaccaaaggcggcggctccgccaacaaaaccttcctctaccagcagaccaaagcgctgctgaacgagaaatcgcttctggaatttttccgctcgaaactcatggatctcggcacctcggcctgcccgccctaccacctggccgtctgcatcggcggcacgtcggccgaaatgtgtctggcgaccgtcaagaaggcttcggcaggttacctcgaccagctgcccacctcgggtaacgaaggaggacgctgcttccgcgacctggagtgggaacagaaaatcctccagatctgccgggagagcggtatcggcgcccagttcggcggcaaatacctcgtacacgacgtgcgggtgatccgcgctccgcgccacgcggcgtcgtgccccgtcggcatcggcgtaagctgctcggccgaccgcaacatcaaagccaaaattaccgaagagggcatcttcctcgaacagctcgagaagaacccggcccgcttcctgcccaaagaggcccccgccatgtcgcccgccgtggacatcgacctggatcaaggcatggacaaggtgcgcgaaatcctctccaaatatccgatcaaaacgcgcctgaacctgcgcggcacgctcatcgtggcccgcgacatcgcccacgcccgcatcaaacagatgctcgatgagggcaagccgatgcccgaatatttcaagaaacacccgatctattacgccggtccggccaagacgccgaaaggaatgccttcgggcagcttcggacccacgacggcaggccgtatggatccttacgtggatctgttccaggagcacggcggctcgctgatcatgctggccaagggcaaccgctcgcaacaggtgacggacgcttgccgaaaacacggcggattctacctcggttcgatcggcggtccggcggctgtgctggccaaagattcgatcaaatcggtcgaagtggtcgatttcccggaactgggtatggaagccgtccgcaagatctacgtcgaaaacttcccggccttcatcctcgtggacgacaaaggcaacgattttttcgcgcagctcaaacactaaacgctccgccccggccgttataggggcaaccaaggaaacagacagtcaatgaaaggttttttctgtaaaataaccctcgcattatgtttcgtaatcttcgtcggctccgcagcaagagccgacgaggttactttcagcgccaacgccccgatggtcgtcacggcaggcgaaagtttccgggtggagttctcgctcaacgccacgcccgacgacgattcgttcgaagcgccggatttcggggcgttcgacgtactggccggcccggcgatctcccagggacactcgattcagatcatcaacggcgcgatgaccaaaaacgtcaattatacgatcacctacgtattgttggcgcaggacgcgggcaacatcacgatcggtccggcttcgatcaaggtcgataaaaaaagatacaagacccagcctctgccaatcgagatctccgacaagccgtcggcaggcagcgcccaggcttcgcagggaaattcaggctcttcggataaaagtatcgaggaggaagcccagggacagatcgccaaagacgatctgttgctgcgcgtccacatatcgaaacagtcggtcttcaaaggcgaacccctgctggcgaccttcaagctctaccgccgggtggcgatcgtgggctacgaagacattaaattcccctccttcaacggcttctggacacaggacatcgacgtttcgaacgccatgtggcagcgtgaaaccctgaacggcaaggtctatgaatcgacagtcgtaaaagagtgtctgctctacccgcagcaggcgggtacgctcgtgatcgaacccgcaacgatcaccgccattgcacaggttatcgtacagagccgccgcaacatcgatccgttcttcggcggcgggcacgaagtctataatctgcggcgcaagttgcagacgccccgcgtgaacatcacggtcaaagagctccctgcgggcgctccggccagctttacgggcgccgtcggcaaattctccatggaggcatcgctctccgcagaccaactggcggccaactcggccgggaccttcacggtgaaaatcacgggacagggcaacctgcctttcatccaggctccgaaactgacgctgcccgcctcgttcgagcaatacaacgtcaaaaccaccgaatccatccaaacggcgactgcgggaacctccggctaccggcaattcgaatatccgttcatcgcgcgcgccgaagggacgtaccgtatcgattcgatccttttcacctacttcaatcccgaccgccgggaatatgtgaccctctcctcgcaaagcttcccgctgcaaatcacaccggatgccaacggcggagagagctacatgatcaaaggactctccaaggaggacgttcagatgctgggacaggacatccgtttcatccgcctgggcaaggcacgcctccagccgatgcgcgagccattcttcctgagcggactctatatcggactgctggctgcgattctcgtccttttcgccggaacttacatcgcgctgcgcaagcagatccgcgacagccagaatgcggctctgatccggggccggcgggccaacaaagtggccattcagcgtttcaggatagccaagaactatatggaagagcacaaccagcacgccttctacgaagagatgctgaaggctttatgggggtatatgagcgataaattcaatatcccggtagccaatctcaccaaggaaaatgtccgcgaggagctccacaagcgcggagccgcgccggaagacacccagcttttctcggaactcatcacccgctgcgacgaagcccaatattcgccggtggcttcggcccgtatgagcgacgtatatcgggacggcctcgaactgatttcccgcatcgaatcgatcatcaaacgctaaaagccatgaaacgatatattctctttctcctcgccacgctgttgagcgcggcggtttcggggcagactgccgcccgaaccgattcgctggctcaacacccgcaatcggagcaaaccgcctcggcagcttacgcatccgatcccgacaagttgtgggatcaggccaacacggcttacatcaacaacgactttcctacggcaatttcgctttacgaaacaattctgtcgagcggcaggcaatcgggcaaactctactataacctggcaaatgcctatttcaaggagcaggaaatcggtcgggcgatcctcaactacaaccgggcgctgaggctcaatcccgggaacgaagacatacgctacaacctgcaagtcgccgagaaaatgaccaaagaccacatcgacgccgtccccgaatttttcgtcaagacctggttgtcgaatctgcgcaaccttttgagcagcacgacatgggccgtcctctcgctggtcttcctggcagcaatgctcggctcagcgcttttctacctgctctcccgtcgtctggtacgacgcaagataggattctacggcaccgcaacagcctttctgctgctggtactgaccctctgcttcgcagccatcgaccgccgggaggcgatcgaccgcacatcggccgtcgtactgcgggatgccgtcgccgtcaaaagctctcccaatcagaactcaaccgatctcttcattctgcacgaaggcaccaaagtagaaatttcggaccgtctgaacggctggtgcgaaatcaccatcgccgacggcaaaaagggctggatggagtgctcgacgttcgaaaccatctaaaaaaccggatccgcccctgcgaatccaaaaatttccaagaacgtgtccagactgcttcaagacgtgaccggagaactgtcgaaactcccaggcatcggacgccgcacggcgttgcgcctggcgatccacctgctgcgcatggaacccgattcggtaagcgacatgacacgcagcatcgaccgattccgccgcgacatcaaatactgcaaattgtgcaacaacctctcggatgaagaaatctgtccgatctgcgccgaccgggagcgcgaccatacgaccgtctgtgtcgtagaacaggtcgccgacgtactctcgatcgaaaatacccgccagtaccgtggactctatcacgtattgggcggtgtaatctctccgatgcagggcatcgccccttcggacctgaagatcgacctgctgatcgagcggatcgcccaggggacaatccgggaagtgatcctcgccatctcgacctcggtcgaaggcgaaacaaccctgttctatctgctcaaccggctgcgccaatacccgcaggtgaaagtcacgtcgatcgcccgggggatcggcttcggcgacgaactggaatacgtggatgaactgacgattactcacgcactgatgaaccggcgggaaatcgaataggaaactcgcgcccggaaaatccgcacctccgccaaatacaaagcaaccgcgaatatccgaaacgaatattcgcggttgtttttccaccgggccgacatttcaccgctgatcgacgaaatgaagcttatcggtatcgaatccctgtttttcgacctgttccagaatccgggccagcacctgcgtagataatcgaggtcggcgagcgagaatccataaatatttggccgatcggccgcttacgacgacccactgccgctcggcagcggaatcgcatgccggcatcgtatagtcgctataaaaaaaccaaaaagacgaaacccgcaggcattcgtaatcggcagacaaccgaccttttgcactcgaaatccggtcccggcccgttctgccgtccttgccccgatagacgattcgcattttactttccgacaataatcggtaaaccacccgggatccgaccgtcccctcctgaaacggatgatcgaaacgagcgatctcgtaccactcgccgacatacaaatcgggattcgcccacggtccacagccgacagcggcaacgaccggtccccgaccgtacgcggcgcccgccacaagcaacatcgtcgcaaacagcatatattcgattttcaccctggtcataacgagggtgtatcgcatattctataccggattacgtctattgcaaagattcctgcaaacttttcaacgtgcggtaaattccctcggcatcataaccgcactgggcatacaattgcgcgggcgttccatgttcgacaaaacgatccggaatacccaggctcacgaccttcggcagatagccgtgctcgcagaagaacgcgacgacagcttctcccacgccgccgcgcaaggctccgtcctcgacggtcaccacacaacggaacttacgtccgacctcgtgcagcagctcctggtcgagcggcttggcgaaacgcaggtcgtaatgggccacccgaatcccgtccgcctccatacgcgcaatggcctcggaagcaaaattgccgaccgtaccgatcgtaaggaccgcaatccgctccccttccttcaggcaacgcccccgcccgatttccatcgcagcgaacggctcatcgcgccaggcgacgcccgctccgttaccgcgcggatagcggatggcgaagggccgaccggcctcgagcgccgtaaacatcatgttccgaagttccagctcgttcatcggcgcagccaccgtcagattgggaaccgtaccgaaataggccagatcgaaagcgccgtgatgcgtcgctccgtcctcacccaccagaccgccccggtcaagacacatgaccaccggaaggcgctggatcgccacgtcatgaatcacattgtcataagcccgctgcatgaaactcgaatagatgttgcagaaaggcaccatgcccgcagccgccagtccggcggagaaagtcacggcatgtccttcggcgataccgacgtcgaaacaacgctccggcatctctttcatcagaatattcatcgagctgcccgacggcatggcgggcgttatccccacgatccgctcgtcggcacgggccagttcgagcagcgtctggccgaaaacatcctggtatcgggccacttcggtcttgctgacgatccgctcgcccgtttccgggttgaatttgcccggagcgtgccataccggcttattgcactcggcgggcttataaccctttccctttacggtcatcacatgcagcaacttgggtccctcgatacgttgcaaggcagtcagcacccgcaccagttccggcaaattgtgtccgtcgatcgggccgaaatagcggaaattcaaactttcgaacaggttgctgttcttcaacagtccctgcttgacggcattgcccgctttctgacaaaaccgcaaaacagccggcgtatgggacaaaatccgccacaggcggcgtttgatagcgttatagcgcctcgatgtcgaaatcttgaccaggtagttcttcaaggccccggtagcctggtcgatggccatgttgttatcgttgagaatgaccagcaggttggtctgcttgctcgcaccggcgttgttcagcccctcgaacgccagaccgcccgtcatcgaaccgtcgccgatcacggccaccacctgccgctgctcgcccttgagttccgcagctttggccataccgaacgccgccgaaatcgacacggaggcatgtccgccgccgaaagcatcgtaaggactctcggacatacgcgggaagccgctgataccgcccagcttgcgattggtccgaaacgcctcgcggcgcccggtaatgattttatgggcataggtctgatgccccacgtcccacacgattttatcgtcaggagtattgaatacgtagtgcagagcgacggcaagctccaccgctcccaggctcgaagccaggtgtccaggattggacgaacattgctcgatgatgtactgacgcagttcgtcgcaatactgacgcaagtcagagcccgacaacttcttcaagtcatcgggcgaatcaatccgatcgagccatttatattccgaatgcatcatggataggcaaagatagcattaaaaaacgacattttttcgaaatttttcctatcttcgcattatcaaattccgctccgcttatgaaatacaacagaatactcctgaaactcagcggcgaatccctgcaagggactcaaaaatacggtctttcgaccgacgtgctccacatctatgcggagcaaatcaaagccgtcgtcggaacgggagtccaggtaggcatcgtcatcggcggcggcaacatcttccggggacttcagggcgcccgcaaggggtttgaccgcgtgaaaggcgaccagatggggatgctggccacgattatcaactcgctggccctgcagtcggccctcgaggacaacggcgtgaaagcgaaggtcctcacctcgatccggatggaacccgtcggagagtattactcgaaagccaaggcgctcgaatacctcgaagccggatacgtagtcatcatcggcggcggcacgtcgaacccctatttctcgaccgactcggcatcggcgctgcgcggcatcgagctcgaagccgacgtcatgctcaagggcacgcgcgtggacggcatctatacggccgatccggagaaagaccctgctgcgaagaagttcgacgaaatcactttcgacgaagtttatcgtcgcaacctgaaggttatggatatgaccgctttcacgctttgccgcgaaaacggcctccgggtcatcgtcttcgacatggacactccgggcaacctggaaaaggtgctcgccggagagaagatcggcacactggtcaaactctgaaaacctattatatcgctatgaccgaacgtaaaaaacccaataacaaacgtcttatcctgatgatcgtcctgcttgcagtcgtcatcgccctgatgtggctgctgcccgacggatcgcagcctgcagcccccgcaacggacgctccgaagaccgaacaggccaagaatacgaacgatgcgcccgacgacatcgaggctacgacccttgttaaagccgggacacaagcacccgatttccgggtggaaatgttcgacggcacgaccttcaccctgggcagtctgcgcggcaaagtggtgcttctgaatttctgggcgacctggtgcggtccctgccgcgaggaattgagccgcgtacagaaggacatcatcgaccgcttcaaggggaacgaagacttcgttttcctgcccgtatcgcgcggcgaaacccgcgaaacggtcgccgctttccgggaaaagatgggttatacgttcccgatgggactcgaccccgaacagaaaatttacagactttacgcctccaactacattccgcgtaatttcctgatcggcaaagacggcaaagttatttccgcgaccatcggttacgaggcccccgaattcgacgaactcattctgctgatcgagcgacaactcaactccgccaactaaacaaatacgacatatggataccaaaaccattctttccgaagcttccgaccgcatgcagaaaacgatcgagcacctcgaagaagagctgctcaacatccgggcaggcaaggcgagcccgaccgtgctgaacggagttttcgtagattattacggatctcaaaccccgatttcaggcgtggcaagcgtcacggtacccgatgccaagaccattctgatccagccctgggacaaaaacctgatccgcgcgatcgaaaaggcgatcattgactccaacatcgggctgaccccctcgaacaatggggagcagatccgactgtcgatcccgcccctgacggaagagcggcgcaaagagctggtcaagcaggtacgccaggaggcggaaaccgcccgcatcagcttgcgcaacgcacgccgggacgctgtcgaagctttcaagaaggcccagaaggaaggcatgtccgaagacgaggcgaaagacggtgaaacccaggcgcagaagctgctcgacaagttcaccaaatcgctggacgcgatactcgacaacaaggaaaaagagatcatgaccgtatagatacgccgtctccgagaaaccgaacaccccgacgcataaacgccggggtgtatctttcatcagagagggattatatccggtacaccacccactcaagaaaactcgcccgtcatgcctctgcgattcgagaaaatcacctcgcacaaaaaacgcttcctcgacctgctcctgctggccgacgaacaggaatccatgatcgaccgctacctggaacggggtgaaatgttcgtagcccgtgacgacggacaggtcgtcgccgaatgcgtcgtcacggacgaagccgacggaatcggagagatcaagaatctggctgtacacctccagtcccaacggaaaggatacggaagacaaatgctcgaatttctggaggcgtactaccgggggcgttaccggacgcttctcgtcggcaccggagatgttccccgcacactccgtttttacgaacgatgcggatacgtccgctcgcacttgatccccggcttcttcaccgatcattacgaccaccccatcatcgaagacggcaggcaactggtagatatggtctatctgaagaagtccttgtaacccggcacacaccggctccgcctgcacaaaaatcgtccacaacggacaaatcccgcccgatcgggctattttttaccggaatcgtctgaaattccgcctttttttaatactttcgcggcaagacaactatgaaactcattcttaaaatatcgctcgcatgcctgctcgcaacaggctgcgcatcgaaaatttccgcccaaacttacgtcaaactcaacggactctatgcgctcgtgggcatagtcaatcccgccgtcgaattcacaatctcccccaaatcgaccttccagaccgaaatagtcgtttcgccgtgggagtcggtaaacaatcatcacgccctcttttgtatcttcatgggcgaataccgccgttatttcaaggagcacaaccggggctggtacctcggagccaatatcggtatgcaggctttcgacctctcgaagccctacatcgaaaactggaagctcaaattcgaaaaccggtacagcaaaggctacggattcatgatcggcctctgcgtcggctacgaacacatcttccgcgaacgctgggtgctcgacgcctacttcggctggtcgtggatgagcagcttctacaacggctattccatggacgggaaaatcgacatgaaccccggccatcaggtcgaacccaaataccccgatccgttcaacggttcgtcggagtggtatcccaacaagatcggattgtcgatcggataccgtattttcaatccgcataagaaaaaatagttcggcaacaactcgtcctgcctccgcgctcccaaaccgattcgaatcacccgccgcacgaacatcgcttccttatcgtcatttttcaaccgtatccgtaatttttcccggtaaattttggcgggggggggaattacttatatttgcagcggaaactcattcgcccgggaatacatccacttttccccaagaacgtttccgaacaaaatataaaccccaagcaaatatccctaaacaatgaaaaaaattcttttcacactgttcgccctggtattggcatccggtatcgccgcccaaattcccgagcccgatttcattggcgaagtattggcgattcattcggacggcacggcagaaaaattggaaaaacacaatgtcaaaatgcgcaccggagccggagtgtatatagcaggtctggccgtcaataagtcgaaaactaaaattctcgtcgcaggcagtcaagccaacgtacgcttcgcagccgacgaaccggtcaatctgattgtccgcgccgtagacaacaaaaccgacccgatgtcgatcgtacgggtattcgccatgaagaacaaccgaaaacaacgctcggcagtcatctcggccgtaggttcgttcaacgtcacatccaacgatatggagtacctgccctttaccgcagaaaaatacggagaaaactcctattacctgactttcggagatgcccctgccggtgaatacggcatcatcgtcaccaaccccaacaatgtcgatgaaaaaatgatcatcgtatcggctttcggaatcgatccggaaaaaatgcctgctgcatccggttccgaaacggcagaggacacagagtaaaacatccggcaaatacggccctggaaacgatatttcgatatcgcactccacgacagcctacaacaaaagaatccccgccgcaagaccaatacttgcggcggggattcttccattaaacggggattacttgcggtaaaccttggtatagccgtaaatcgcctcgtcaccgagctcttcctcgatccggagcaactggttatacttggccatacggtcggaacgcgacatcgagccggtcttgatctgacccgcattggtcgctacggcgatgtcggcgatcgtcgaatcctcggtttcgcccgaacggtgcgaagtaaccgacgtatatccggcacgatgcgccatctcgatagcgtcgagcgtttcggtcagcgtaccgatctgattcaccttaatcaggatcgagttcgcgcatcccatctcgatacccttgcgcaggaaatccacgttggttacgaacaggtcgtcgccgaccaactgacacttgtcgcccagctcggccgtcagcatctgccaacccgtccagtcgttctcggacataccgtcctcgatcgaatcgatcggatatttggcgaccaagctcttgaggtactcgacctgctctttcgaagagcgctttgcaccgttcgcaccctcgaacttcgtatagtcgtaaacaccgtccgcataaaactccgaagaggcgcagtccatagcgatcgacacgtcgccgccctcgctcttgcggcccggcttgtaaccggcagccttgatcgcttcgaggatcgactcgatcgcatcctccgtacccttcagcgcgggtgcgaaacctccttcgtcgcctacggccgtcgagaggccccggttgtgcaacaccttcttcaggctgtggaacacctcggcacccatgcgaagaccttcgcggaacgagggagcgcccaccggacggatcatgaactcctggaaagcgatcggagcgtccgaatgcgaaccgccgttgatgatgttcatcatcggcacgggcagcgtcttggcattcacaccgccgatgtagcggtagagcggcagaccgaaatagtcggcggcagcgcgggctacggccagcgaaacacccaggatggcgttggcgcccagcttcgatttggtcggcgtaccgtccagcgcgatcatcgtcttgtcgatgcccacctgatccgttacgctcataccgacgatcgccggagcgatgatgttattcacgttctccaccgccttctcgacgcctttgcccgaataacggctcttgtcgccgtcacgcagttcaagggcttcgtgctctcccgtcgaagcaccgctcggcacggctgcacggccgaatgcacccgatacggttcttacttcgacctcgatggtcgggttacctctcgaatcgaggatttctcttgcatggatctctacaatctgcatagttgtaaatttttgaattttataaaaaacaatttcgttttcaacggtcgtttcacaggtgcggcatctgcctgcaacctcggttgtctgccggatcgcacccaccggacgcacgaaaagtcgcaacgaggcggatccgaattccgaactgccgcagcgcaatctgtcgaaccgtgcaaagataacgatttttacagacaaactgttattcgaataacattatttctcccttcgaagtcggttataagaaacggcaaatccgacgccaaaaacttattttatcaacgaaaaacctttttttatcaccgatattttcttatcttcggtatagaaaactaaccctaacttcgatcgtatgaaaaaacttttcctctgtttgctggcgataacggcagcgatctccaccgcatgggcacaaacgcccaaaaagaatattttcggccttcgggtcggtatggatatgagcaaaatcagcatcctggataccggttccggagagaaatacctgtcggaattacggacctcattcaacatcggcctgacggaccagatccgactgctgaacgacaagcccttctatttccagttcggcctgatgctgcacaacaagggaggaaaagtccaagctaccgacggcggctcggacattgagctctccctgaacgcaatgtacctggaacttcccgtcatgctcaactaccacatccggctcgccccgaaagtcgctgtcattcctttcgccggattctacggatcgctgggtgtggacggcaaacagtcctttgacgacttgggacttgaaatccaacagaatttgttcggcaaaaataaaatgtttcaacgcggagacttcggcgggcggataggcatcggattaagcatccactccgtctatatcggcgcctcttacggcggcggtttcctcaacatcgcccaggaagacgacacctccaaattccgcaaccgcagttggtccctctccgtcggctacgatttttaacccgtctgtctttttatttcattaccgaaagtccgtatcgggacctcgccccggtgttccgaaacagacataaaacggccctgaagaaaacttcagggccgtttcttatcgtttcacggaaagcggcaggtccgcgcctccggcatagaacatcgccagatcgaccggcaccgtcccccggttttcaccatagtggaacgtattcaccagttcgacgataccgctgcccgccgaaaaagtcttcgacagaccgttttccgcaacaacggtaagttcgccttgcagcacgacaccggcattgattacgggatgacggtgcatcgccagccgttcaccgggagcgatcgtaatccgaagaatcgtaatacggggcgttcccgcaggataagacggcagcgccgtgccgtcccaactctcggaagtatcgacgatcgtcgtggaaccggtccgtgcctcgcgggagtccgccgacacaactccgcccgattctccgaccggatcgccgcacagctcccgcaacggattccgggacactatttcagattcttcttgcggatcacctccagcatatcgtccgtcatgctcgacagatcccactcgggcttccaaccccactcctcacgggcgcaggtatcgtcgagcgaattgggccagctttcggcaatggctttcttcaccggatcgacgtcgtaatccatcgtgaagtcgggcagacgcttcttgatctcggcatagatgatctccggcgtgaagctcatcgacgcgatgttgaaactgttgcggtgtacgagcttcgtcggatcggcctccatcagctccacgcaggcacgcagcgcatcgggcatgtacatcatgtccatatagacatcgcccggcacggggcaggtgaagcggcccgaacggatcgcttcgtagtagatctccaccgcgtagtcggtcgtaccgccgcccggaagggtcacgttggaaatcaatccggggaaacgcaccgaacgggtatccacaccgaaacggctgtggtaatagtcgccaagcatctcgcccgtcaccttgcatacgccgtacatcgtcgtcggacgcatcacggtatcctgcggagtcttgtccttgggcgaagagggaccgaacgcgccgatcgaactgggggtgaacagcgcgcagttatactgacgggccacctccagcgaattcatcagcgcaccgatattgacctgccatgccgtctggggcttcgcttcgccgacagccgacaacagggctaccaggttaaaaatcgaatcgatcttctgacgcgacaccatttccgccattgcattggcatccagggcgttcatcacctcgaaaggtcccgactcggcaagctgcttgcactcgcgcacgtccgttgcgaccacattgtcgtttccgtaaattttacggagataagttgttaattcggaaccgatctggccaccggcacctacgattaagatacgtttcatatatttttagttataaaccggaagcaaagatataaaatgattatcaattccgaactttttcttcgcacttttcaaatcatagaatccgggccgcttcccatcttattcatactccatccgtactatgcaaaacgttctcaccgcagaaagacatgcccccggcggggcaagcggcaaaaaatcccgcccggggaaacctcgggcgggatatcgttgttcgtatcagccggtacaaccggccggaaagcatcgctaccggcgacaggcatcctcgcgcccgctaccgttgtgacgcagaaggaccattactgaatcgtccatgcattggcaggattctcttcgccgtagcccatcacctctttccaactggtcttcagttgatctctcttagcctcggactcgacgataatcgtctgcgaatcgtagccggaccagtagaaaccggactcgtacgtgccataattttgaatgcaagtagtcagcaacggacagttagcgatattcacttcagccgtgccgccgacgtagagtagcgcgagcttgctcaatccggatacattcagcgacttcagcgctgcgggttctccgtagctatccattacgctcacatattccaagtcggtatattgagtcagatccaatgtcgtcggaccaaccggttcatgattagcatatttgataatcgacttaaagcttttaattccgtcaggcagttggatcgaagtatagcctgcggtcggcgacatagtcacatcggtcagtttcgtaaaagccgacaggtcaatgtcgcccaacgaaacttgccatgcattgatcgacaactttgtcagattggtacacaaatccaatccgtcgagggtaagtccggtagcatccatagaagtcgttatattgatctccgtcaccttagccagcatctcctccgtaatcaccgtattgatatctccgacgggattgacggtttcgtcgtccagaatagccttgcgcagcacggcattcatcgacgcagcagcctccgtacgctcctcatcgacgcaccaccaggtaacggatacgccatagtcggaatactggctggccatcgcagacttttgagccagcgtagcgatgatcatggtaccgtcggcgaacatattcgtaccgctggatgcatagtcagccgatgcgaaagtggtaatgggcatctcgtggatgtccacggtcgtcattttggggcaagactgcaaccagaacatttcgacagtcgatgcggaaccggtcaaatccaaagtttcgagcgatttggctccctcgacaaccactttcttcaatgccggacaattggaaagattgatcttggacaagttggcctggtcgttggagaacttgagctcaaacgtcgtcaagttttcaagcccactcacattgagactcgaccacaaaccattggccggagagagcgacacccttgtcagcttcttattgttcgacagcgtaataccattcagttcgtcgcaattcgaattgacaacaagcacctccaagttggggaaacgctcaatatacatcaaactctttaccttgcccccgaaaccagtcgaataaatttccgttacgctttcggcctcagcctgcgagagcagaccgtctccattcgcatcgtattcactcaacagataagcacgcaggttggtgtccatgcccgaagagaggtcttccgccttgaactccgtcacattatagagtttattggccgccgtggtcagcggagtcgtgaacttacgggtcaaaatctctttattcacatcaccggcatcccaactgtaataactgtgaacgatcttcagcgaaacacccttcgtaaactcgatcccggcaggtacgacaaaatgcacctcggtagcaacatccgtcttgagcgttacgtccgatgcacaagtcaccgtaatggatttaccctcgcccgagaaagtcatggcaggcacttcaccactgaaatccagcgcataagcaccggcgatagactcgtcgttgttacccgtaaggatcagtttgttgaacgtatcggtacccgtcagtttgaaacgcagcacggcacccaccgaacggaacgccaacgatgtatgatcttcgcctacggccgccatcgggttgagcgtcgtagcgaaagttccctcggcgaacgtctgcacggcaggaatctccagaccggaaacggtcgttccttccagcgtagcacctgcagcataaggataataggcgaaagccttcgcagcctccgtaccctcagcatcggtcgcatcgcccgtgaaagtcgcggatgcagcgttgtcatccttggtggtaaatttcgcgttcacgaacttcgtcccggagaaaataccgagcgcatcgttcgccgaccaccgtacatcagcaccttccaacgaagtacgggtaccttctaccgaagcggtgatttcatagctccttgcttaacttccggcgcaaccgtcgtatccttcgtacaggaaaccgaagcagccaaaacggctgcacaaccaaaacaagctaaaaatcttttcataataattcggaaggttgaggggttattcataggtttcctcttcgaacgaagcgacagaattgccgaaaccgttctcgattgcaaattctgcaatacttaactccggagcgacgtatgtcctccgttccgcaacatttaatttttccataaacgattaaaataattaaggttaataattgatgaattttcagcaataaaattattatttttttactatcaaaacaatttcaaagtaaaagaaagcaagatttctttgacattcaaaatattacatcttgaatatcagcatcttaaacactaatcaattgtgcttttttttgtttatagaaataaattgttaaatcagaaaaaccaatacattttccagcctgacaggaaaagacacaacctgtataaaaaactaatgaattaattttgtgtcacttacacaaatacgaagaaaaacgggaacgcattctgcgataaaaatccgccgatttttttgttatttcatttttgttatatacttttgcaccactcgaaatcgagaaagttgctgttttagctcagcggtagagcacttccttggtaaggaagaggtcccgggttcaagtcccggaaacagctcgaagaaaagagggtgtctgacgaaccgcagacaccctctttatttatttttattcgtactcttatctagaaatcatttccgaatatgcgattctcggaagataaaaaacttgccagcccctttacagcctcacgctcaatgcagacgccatagctaattcgaacgactttgccgcgttgcaggcacaaaaaagctgtgcttccgtacaacatttcgccccgtttccactcttcggcagagcccgctcgacttcgcgttaccgcatgccgcccgtccttccctccgttggaccggaggcgaccttgcgaactcctgattttcgcctgccagccatacgaccaacttttatcttcagaccgctccggataaatttgtccaccccgaaaataaaaaaggttgcaaacgaatgtttgcaacccagccgaccacccggtcgtttgcggagagagagggattcgaacccccggtacagttgcccgtacaccgcatttcgagtgcggcccgatcgaccactccggcatctctcccggtccatcaccaacccttcggccggtaattcggagtgcaaatatagctatttttcgcaaaaaaagcattttcggaacaaaaaaagattcgaatttctattttcacccgctcaatgtatttcccgattttattgctacttttgtgagataatgactcatcggcaataaaaccggtacggttttcgttgaaaatataaccacacagtaactccgaaacacgatgaaaaaccgaaatttcaaaataggtgctctgctcgtgtcgctcttcgcggcaagctgttcgccggcactctaccaatccggcgcctacaacatcgacgacatgtacgcggaacacgatgtcacccgcatcgcccaggaaaaacaggcgatagccgaagctcgcaaggccgaagcggaagcccgtcgcgccgaaatagaggcccggcaggcggaagccgcatactacgcatcggacgactcctaccagggcgtgctggccgacacgtacgaaagcgcctatgcccgtcgtttgcggggattcagctccccgacctatcagatgccgacgagctatttcaaccttcgttacaacggcacctaccaattcgtttcggcctacgacccggccgtttacaacatcatcgtcatgggcgacgaagtgtgggtcgaacccaaatacattacttcgatgttcggcacatggggttctcccagcatagtgagcttcggatggagcgcaggtctttacaacgactggtatttcagttggggttacaatccctatccctgggcataccccggtttcggctggccttattacagctacaacccctattgggggtatccttactggggaggctattacccttactggggttattatcccggctggggaggcggccatcaccaccacccgtacccgccgcaccatcggcccaatgtcgtacaccgttcgacctatcgatacggctcgggagcaggatcgaacatcggatcgaccagtttcggaggccgcggacagggcggtatgaccaacggctacagaaacggcaccacgatcggcagcggcagcttccggggcggcaggaccaacagcaattccagttccagcttccgaggcggctcatcgtcagtcaatcgaggcagctccacctaccggaatccctctttcggaggcaacagcagctcctaccggggaagcagttcgacaccgaatagagggacttacaccccggccccctcgcaaccgaacagaggttcgagcggcagcttcgtgggcggaggcggaggagtccgcggtggaaacagcagcggacgcaactcttacggccgttaaacgatcaccccggcaaatttcgacggacggcgcacaggatgcacacgcaggcggcaaacgaatatgagagcaacgaccggtttcggccgacaacagcgatcagttccgcccctgcgcccccgaacgccggaaacgaaaaacaacacaacgattttttgctatgaaacatctcggatttttagcgctgctttcggcggccttgttcgcaaccgccccggtgtcggctcaaaactccggaggtttattgatggaccgtgacatcgtcaccccgtccgacctcttcgaactctcgcaaacgactttcagcctcggaacggcgcggtcgatggccatggcaggcgctttcacctccctcggggcggaccttacgtccatggctatcaacccggcaggtctgggcatgtaccggcgcaacgaaatttcgatcacgcctctgatgagtttcgcacgagcggaaaacaacgctccggcattcaactccaacggcaaaaaccgattttcgatcggcaatttcggcttcacggccaatgtttacgaaggatctggaccgctcgtgagcgtcaatatcgggttcggctacaaccgcctgcaggacctcaactaccaatactcctattatacacagggcaatgtcagctcgatcgccgacgttttctccgacatgctgcaatacagcggtatcaacagggatcagatcaccggcggcttcaactggagcaacttcaacccccggctctggagttcgatcctcggctacaaggccggattcacggatcaaatcggcggcaggtggcagccgacctggatcggcaacaacgtcgatatcggcaactacacgaccgtcgtaagcaatggctcgataggcgaatacgacatttcggcaggattcaacctgaacaacaagttctatatcggggccacgttcggcattcagtccctgtatcaacgcaaaacatactattacggagaagattacgtctatcccggcaacggcaccgatccgaacctggactaccagttgctctattcgaacttcaaccaggaagtcatcctggacggcgcaggggtcaatttcaagctcggcatgatctaccggcccattcagaacctgcgaatcggcttcgcgttccacaccccgacctattactggatcgaccgtacctatcaggcctacaccgattccggggtgcatgtcaataacccgagcgaccccgacggcctcaaacccggtcccgacggcaaccaatatacgaacgccctctctcccgtactggaagatacgggcggttacaactgggagttcaccacgccggcccgcctgatgttcggcatctcctacgctttcggcaaccggggtttgatctccgtggactacgagcgcgactggtacaacgggatgcggatgaaaaacaatcccgcgggcggcgataacgaaatctataacgacacgttccgatcctggtacaaaggcgccaatatcgtccgcataggcgcggagttcaaaccgctgccgttcctggcgatccggggcggtttcggctacatggggtccatgctgcaggacgaagagcaagtttcagcagcccccatgaccaagcagatgctctactattcggccggtttgggatttttactctctccgggcgttgcattggacctggcctacaactattcctcgaccgagcagacggactacaacctctactatttcgaatctccgagcggcataaacggcagcggcatctacaataccaaactcaagcgccacttcgcggccctgagcctcagcttccgcttttagtttcgcacgacatatcgcaacggcaggacctccggcacgggaggtcctgtcgttttttatccgggaagaaccggatttcgggccagcgcagaaaacgcaccgacttcagaaacgcaaaacgagccatcgcatcttcggccgacggatcaaagcgacccgcccctcgcagcgggcaaattcaagatttatcggagcgcagttgcgaatttctgcataaatcgttaattttgccgactaaccgacatacgccggctccgaagccggcgacacgattcccggaagttaaaaaataaatacgatatggcaaaggaacttaaagacgtaaccaaagccgaggacaactactcgcaatggtacaacgacctggtggtcaaggctggtctggccgaaaattcggccgtacgcggctgcatggtaatcaagccttacggctatgccatctgggagaaaatgcaggcggccctggacaagatgtttaaggacacgggacaccagaatgcctactttccgctcttcatccccaagtcgttcttctcgaaagaggccgaccacgtggaaggctttgccaaggagtgcgccgtggtcacccactaccgcctgaaaaacgatcccgagggcaagggcgtcgtggtcgatcccgatgccaaactcgaagaggagctgatcgtccgtcccacctcggaaacgatcatctggaacacttacaagggctggatccagtcctaccgcgacctgccgatcctctgcaaccagtgggcgaacgtcgtacgctgggaaatgcgcacccgcctgttcctgcgcacggcggaatttctctggcaggaggggcacacggcccatgccacgaaggaggaggccatcgaggaggctacccggatgatccacgtttatcagaaattcgtcgaggagtggatgggcgtaccggtaatcgtcggtcacaaatcgccgaacgaacggttcgccggtgcggtcgataccctcacgatcgaagcgctgatgcaggacggcaaggccctccagagcggcacgtcgcacttcctgggccagaacttcgccaaggcattcgacgtacaatacatcaacaaggagggcaaactcgaatacgtatgggccacttcctggggtgtttcgacccgcctgatgggagcgctcatcatggctcactcggataacaacggtctggtgctgcctccgaaactcgccccgattcaggttgtcctgatacctatctataaaggagaggagcagatgcgacagatcgtagaacgtcttcgcaccatcgccgaagagctcaagtcgaagggactctccgtgaagatcgacgaccgcgacaacgtccgctcgggcttcaagttcgccgaatacgagctcaagggcgtccccgtacgtctggctctcggcccccgcgacttggagaacggcacgatcgaactggtccggcgcgatacgctcgaaaaggaaaccgtttcccaggagggactcaccgaccgggtggcggtcctgatggacgaaatccagcagaatatcttccgcaaggcgctcgactaccgcaattcgatgattaccaaagtggacacgtgggacgaattcgtcgatgtgctggagaacaagggcggcttcatctcggcccactgggacgggacggtcgaaaccgaagtggcgatcaaggacgctacgaaagccacgatccgctgcatcccgatggatgccgtcgaggaggagggcaaatgcgtattcagcggcaaaccgtcgcatcgccgcgtacttttcgcccgcagctactaaacgctgtcgataccgaattatcacaacgaagacggatgccattcagagaagtgtccgtcttcgtttttgcaggaaacaggtcatgaactatcagaacgattcagtccgtcggcaggaccgcttgctcgaccaaccggaggcgacggagctgttgcgtcagggcgaatacggcatactctgcatgcagcgtcctgaaggcggcggctacggagtacccctcaactatgtctgggacgaagccgacgcgatctacatccactgtgccccggaaggacgcaagttgcactgcctccgggaatgcgaccgcgtcactttctgcatcgtcggcaaaacgcaggtgctgcccgcacggtttacgaccttctacgaaagcatcctgctcgactgccgggcccgcacggggctcacagcggaggagcgtcggagggccctgaaccatttgatcggcaaatattccccggagtacaagacaattggcaggcaatatgtcgaaaagtctttccaccggacagagattatccggctcgacatcctgtcgtggagcggaaaatgcaaggataacctacatccgggtacgacaccgcccggagcaaacagcaaccggacatgaatcaacccacggaacgcacccgaaaaatttaccgggcaacctggatcggaatggtcgtcaatatcgccctctccctcctgaaactcgcggccggcatcctcggccgaagcggagccatgatcgccgatgccgtgcactcgatatcggatctggcgaccgatgtcatcgtgctgatcttcgcccggatctcctccaaacccgaagacgccggccacaactacggacacggcaagtacgaaaccctggcctccatcctcatcagcctggccctgatcgccgtcggcggaggcatcctggccgacagcatccgcaacatccgtctggtattgaccggagaaataatcggacgaccgggcgcgatcgccctgatcgccgccgcaatttcgatcgtcgccaaagaggtcctgtatcgctataccgttcgtgtgggacgtcagacggacagtccgagcgtcgtagccaacgcctggcaccaccgcagcgacgcactttcgtcgatcggcaccctgacaggtatcgggctcgcctattttctgggcgacaagtggcgcatcgccgatccgctggcggccctcgtcgtttcggtcttcatcttcaagatcgcattcgacctgctgcgaagcggcctcggagaactgctcgaacacgcccttcccgccgcaaccgagcaggagatactgaacatcctgacccactcgaaggaggtgaccgaaccgcaccatctgcgcacacgccgtatcggagccaccgtcgccatcgaagcccatatccgcgtcgatcctcggatgagcgtgctccgctcccatcaactgaccgtcgatatcgaacgccggctcaaagagcgattcggccccaatacgctcatttccattcatgtagaaccgatcgaaactgaaaaactttcatcttcggactcggagaaagataaaaatatctgatagattttatttttggcatagttattgttaattcatcgataccctgccggaaaaatagaaatctaaaaagtttgtttttttggataattatttctacctttccgacacaaaagatgccgaaacgggtatccggcgcatcaaaaaacagaaacttaacaacttaaaagattgcctatcgaaacattctactcttaataactaattcaggagaaaagagtatgaacattcaagtattaagcgaccagcacttgcttaataattatcgttcgggtgatcaaagtgccatttccaaattgatcgagcgccacaagcgtcgggttcgggactatatttatatgatggtcaaggacaacgatgtagcggacgacatcttccaggaaacattcatcaaagccatacgcgtcatcgacgaaggccgctataccgataacggcaagtttctttcgtgggttctgcgcattgcgcacaaccaggtgatcgaccacttccgcgcctgcaagcagaacaagcaggtcaatgaaagcgaaagcggctacaacgtactgggatcgctgcgtttcgcggaaaagacgatcgaagatgaattgatctcctcgcaaatcgaaaacgacgtgcgcaacctgatcgaactgcttcccgaggagcagcgcgaggtggtgatgatgcgctactactccggcatgagtttcaaggagatcgccgagcaaaccggcgtgagcatcaacacggcgctgggacgtatgcgctacgcgcttatcaacctgcgacgcatgatccgggaaaaagaacttattttatcttaatccgtatgcaataaagcccggaggccatccgtttctttaatgtaatgaactaaaaaagaaatactaaaaggcctcctatgactgaaaacgacaaaacggatacatcaaggtctatctccgacgaagaactgatgaagaatgaagtgatcggcgacgatgcagatctgtattatctcgattgctatctttcggacattcttggaaagggataattttagggttaatttttgatgggaggaggcgacaagatatcttgtcgcctccattttttataccgatttcatccgacgactaccgtcggccagccgcgcaccctcatccggactacaacccctgcatctcctcgcgcgtgatatgcacctcgacacccccgagtgcataacacccgatgtcgtaaggattgtagtaaaacgtaatgccgtcctcggtcacttcgaaattctcggtcgtggaaatgtattcggggaaaaatccctgcgccaccaaaccttcgtcacccgtgacaccgaactgttcgtaaagcttgttgcggatcaacccgagcaaagcctcctgttgtgccgcatcgaacagatcggacaaagccagttcataaccgcctgcaatggaatagttgtgacagttgacgctgtacatgccgtgcgcaccgcccgtatagttcgaactcgaaatcgtatagaccagcaacgtatccaccacacgggcctcggactcgaccgccatctccatttctgtttcccactggggtaccgactcatccagggtaccaatatactcgtccatgaactgcccgatagaccgatcgacggcctcctgcaccccaccctggaaatgctccagcccgaagaaatagagcatattggactcctgaatagcctgcaatgccggagcttcgtcggcattggcaatcgaggtaaaggcatattggaagcgacagggtatcccgccgcgtaccgccacggtatccgtcaccacgatatcgaattgcggcatcacggtctgccgacggcacgatccgaaagtcaatccggcaaaaacaaaaaaaaggagaatcacacgtttcatacgaatccgaaatattttgaacaagatataacgaatgtcccgtccagacccgcatataatcgggttatgcccaagtacatcctatcttctacaaatgtacataaaaagccggatgaacaagcggcccgagaaaaaaacaacagttttcacgaaaaaaatttgtaaattcaaaacatcgtattacctttgcaacaccaaattccaacggtggattcatctaagggttaggatacgtgcctctcacgcacgacataggggttcgaatcccctatccactaccaagagcgactgtaacagtcgctctttttattactgcctctccggagtaacgggacaaggggaggagaaccccattcgaacaaacggagcagcgagacccggacgaactccgttcgagccgccgagtcgtgacgtttgaagacaggcgaagcgaaatcaattccctatccactaccgaaaacaactgtaacaggtcactttttattttgcactccacggctccggtacaaagaccgggaatcccgattcgaaccggatgcgcaacggagcaatgcaaagaccgtttatctcgacgcaaggcagcggctcccgatatagaagaagcacaccttgccgtccttcgcccacaactcctgcccaaaagtcgccgaaattaaaaacattccgaaatccgatcggcaaaaatcataaatttaagattaatgacctgcacaagcaatatttcagttcaaaccgctatctttgcaagcggattaaatacataatatatttttcgcatgcccaccgtttcggtcattgttcccaactactgtcatgctccctatctcgagcagcgtatcgaaagtattctgcaacaaacgtttcaggacttcgaactgattctgctcgacgattgttcgacagacggcagccgtgaaattctcgaacgataccgcaatcaccccaaagtttccggcattttctataatgaacggaacagcggatcacctttcaaacagtggaaaaaggggttgtcgaaagccacgggcgattacgtgtggatcgccgaaagcgacgacttttcctctccctgttttctggaacggtgcgtccggattctcgacacccgtccggattgcagcatagttttcaccagcagctatatcgtcgattcccactcccggaccatacgggaggaggcgcccgtcaaatatcccaaacacaaacagatccgattcggcagccgtttcttcctctaccgttttctctgcccgaggaacaccatctacaacgcaggaatggcactggtgcggcgcagtgcgctccctgcggacgacaattacacccaataccgttattgcggcgactggctgttctggatacagatcgtatcgggggggggaaatgttgtctatcttgccgaacccctcaactactaccgggtacatgacagcaacaccaccgcagaatcgatcgtcacgggacgcaagcacatcgaaacgctccgcatcctcgaagaaaccttccgactcatagacccgcccctgatctgccgcctctcgatcgcgggcaaacacctgctgcggatccgcaaagccgccggcagccactggaacgaggagccctatctctcggtccgcctcgcctggcgggagcgctaccgtcatccccggatgataatgttctggcacaaggtgttcaaagatcttccccgcagtttctcccgctaaattcgccgggaatcgatccggcaacgaccggacagccctctaaaaataccgcattggagcgatacctcccatttccggatgcaaattgcaccggaaatgggaaaaaagagttatttttgtaaggtttaacctttaccccgacacaaatgctcatcaccgtcatcgttccgatttacaacatggaagcctacttgtgcaccagcctggaccgcctgttgcagcaaagtttccaggattacgaaatcctgctcatcgacgacggcagcaaggactcctcgggcgaaatctgcgaccgctatgccagggaacactcccggatccgggtcgtccacaaacccaacggaggattgagcacggcccgcaacgcgggtatcgaacacgcccggggcgaatacctgaccttctgcgatcccgacgactgggtcgatgcagactacctgcaacaattcgtcgaagcaggcatggacgaacatacgctgcccgtgacaggcatcctgcaacaccgggaaggcaaatcggaccggcggctgacagcgcctgccatggacgtacagggccaagcctgcacggaagccatcgtcgccctgcggcggcacgacatgctgggattcaccgtcaataaattgctggtcaaacggatcatcgacgagaatgggctccgcttcatcgaggggctctcgcaccgggaagacgaaatcttcctgctgcaatacattccccacgtttcgcgcatcgtcatcaacgaaaaaacgccctaccactaccgggtcctcggcagcggcctctccaaaaaacgcaagccgacggagctgattctccgcgtttcccgccagctacacgaccttttcctacaggccgcacctaccccggaagggcgttatgtcgcagcccgcatccggttgcaacaatgctgcgaagcggtcgcggcgtcgaaaacgaacgaggagctgcatattgccgtaaaagcggctcgcaatgcccgcgaagagtatctttcgaccttcgaccccgcgtttctcgccgaccgccgggatcggaaagtcgcggcccgcagccggtgggtcttcgccctcggagctctctccggcaggctgcttcgacgcctcacccgattgattcacatataaacccgctgcatcatgtcgaaatacgattacctgatcgtcggagccggacttttcggcgcagtcgcagcttaccgggccgcacggtccggtaagaaagcgctggtcatcgaccgacggccccacacgggcggaaacgcttactgcgaggagcgcgaaggcatccgcgtccacaaatacggcgcccacatcttccacacctccaaccgcgaagtgtgggagttcgtgaaccgcttcgtcgaattcaacaactacatcaactccccggtggccaactacaagggcaagctctacaacctgcctttcaacatgaacaccttttacgccatgtggggcgtcaccacgcccgcccaggcagcggagatgatcgaccgtcagcggcgcgaagcaggcatttcgcagccccgcaacctcgaagaacaggccatctcgctggtcggcatcgacatctacgaacggctcgtgaaaggttacaccgaaaaacagtggggacgcgacgccacccaactgccggcattcatcatcaaacgcctgccggtgcgcttcaccttcgacaacaactacttcaacgaccgctggcagggtatccccatcggcggctacaacaaactcgtggacggattgctcgcaggcgtcgaggtgcgctgcgacaccgatttcttcgccgaccgcacgcactgggaaagcctctgcgaccgcatcgttttcacgggccgcatcgacgaatactacgattttagactcggagagctggagtaccgctcgctgcgcttcgaacacgaaacgctcgacacccccaactatcagggcgtcgccgtaatgaatttcaccgagcgcgaaattccctacacccggatcatcgaacacaagcatttcgaaccgggcggcgatcagccccgcacgatcattacccgggaatacccggccccgtacgaacatggagccgagccctactaccccgtcaatgaccagcgcaacacgaaactttacgaaagctacaaggcgttggccgaccgggaccggaaagtcatcttcggcggccgactcggagaataccgctactacgacatggacaaagtgatcgaaagcgctctcaaacttaccctttagaaaaatgagcaaaaccgtcatcctggtctgcgcccacaagcaggacgcatgcctcaaaaccccgccctaccagcccgttcaggtcggacgggccatttcgcaaacggaacttccgttcgccgtcggcgacgacacgggcgacaacatcagcgaccgcaaccgccactactgcgaactcacggcccactactgggcctggaaaaacctgcacgacgcagactacatcgggttgaaccactatcgccgctatttcgacttcgagggcggttcggcctgctcgctgcggacggttcgctcggaagccttcttctcggcatcgcatccggtccccgacttcgaccgccttttcagccgctgcgatatcgtcatggcccggccgaagatctatccctacaacctctacacggattattgcaagtgccacatcgaaagcgacctgctgaccgcacggcaggtgatcgcagaaaaatatccggcctacctgccggatttcgaccgggtgttcttccgcaacaaccgcctctcgcatttcaacatgttcgtcctgccgcgcgagcggttcgaggcttactcggcatggctgttcgatattctgttcgaggtggagcggcggatcgagattcaggacgaccccgtgcagggacgcgtgatggggtatttgagcgaacggttgctctcggtatgggtccggcacaaccggctgaagatttgctacaaaaccgttctgatggtcaatgaccagaagcgaaaagggctgggcaagcaccttttccatacgacggtcaatactctggcgtactggatcacttatccgctgcggcgccgctcgccgcgtcgggcagcggaataatctgctgccagaagcgccacatccggggcttcgaccagctatggcaccccatcggcaggcgactgccgcacaaacggtagcaatagcggggattggtgtcgaacgcgaaccgcagcgcctcctcctgcgaaggataacgaaacccttcgggaacgacggcccagaaaacatcctcgttgcccaggtggttgcccatcgaacaaaaccgctcgatctcgtcgccgtatttttcgcacgcggcccgaaaactctccacgcggcgaagcgaaagacctccgtttccgatcttcccgtagagcgactgccggatcatccggcccgcccgctctgcacggcgaagcctccaccgcaggtattgcttcagaatcggcagatcatacactttgcggcggacccagggagcggccacacagtcgtatcccctacggcaccagtcggcgagttcgtcccggaaaatccaggcgtcggtatggcagatcaggagatattcgtaatcgcggaacaactcgtagaatccggccgaaagcatcatccggttgtatcccgcaatcccgttcttgcggcccagccattcgtccgacacctcccgaaccggcagtccggagaactcacgccggatcgccgagcaatccataccgcagggaaccaagagttcgaccggataattttcctgtaacaccccaacagtctgcctcaacgacgcccgttcccagacggtcaattccggccggtaaacaggaacgacgaccaccacttccttcttatccatacgctattttttcaagtaatttacaacggcatcggcgatacgctcgccgtcgagcgccgcagaaatgattccgccggcatacccggccccttcgcccgcagggaaaagcccggcgacctcggggtgcatcagcgtctgcgcatcacgcggaatgcgcacgggggtcgaggtgcgggactcgacgcccacgaccaacgcttcattggtcaggaatccccgcatccgccgcccgaaagtggcgatacccgcccgcagggaagaggcgataaatccgggcatccacttatccagccgggaaggcacaacgcccggtatatacgaggtccggggcagcgaaccgctcgcacgtcccgccacgaaatcggcgacacgctgggccggagcgatctgatgctcgccgccgtattgccgggccagccgctcgaactgctgctggaatttcagcccggccagctcgccccactctgcccgcagatgctcgaaatccgcaagccgcacctcggtcaccaaaccggaattggcgaaaacggagttccggccgctgggcgacataccgttcaccaccgattcggccgcatcggtcatcgccggaacgatgaatcccccggggcacatacagaacgaatagacgccacgcccaccctcctggctgaccaacgaataggaggccgcaggcagatactctccccgcgactcgcagtggtactgtatcgagtcgataagcgcctgcggatgttcgatccgcacgcccatcgcaaaaggcttggcttccagacgcacgccccgccggtgcagcaactcgtaaatatcccgggccgaatgtcccgtagcaagaaccacagccgctccttcataaagggtatctccgacccacaccccttttacgcgatcgtcgtgcaattcgacatcggtaacccgcgcatcgaaaacgaacgatccgccggcttcgagaatcgtccgccggatattggagatcaccctcggcagtttatccgttccgatatggggatgggattcgtaaagaatttcgggcgtggcgccgtgaaaaaccagcgtttgcagcgccttgttgtagtcgccccgcttcttgctgcgggtgaaaagtttgccgtcggagaatgttccggctccgccctcgccgaaagcatagttcgaatcgggatcgaccgcaccgttgcggttgatctgcgcgatgtcccgcttgcgggccgacacatcgcgtccccgttccagaatcaccgggcgatacccccgttcgatcagccgcagagccgtaaacaaccccgcagggcccgaaccgacgatcacgacctccgtacgccccgcaaccgacggatagtcgaaatgcacaggtgcgggctgcggttcgcaatcggcataaacttcgagcgtaagattcactttgggctgccgctgccgggcatcgatcgaccgtccgacgacccgcaccaaagccacatcctgctccgcgacacccgcacggcgagccgcctgttcagtatagtattttacgtcggcagcctgcttcggagtaagaaccagtgtcagtttatacggcataatcgattgaaatagtttgcaaaagtaaccaaaaatcggcaaaatcgcccggcatccattcgagaaaaaggttttttagttatctttgccaacagataagaggcggctcgggcaagctcgaatttgtttggcttgtcgcttgctttccttatccttgcaaaggacaggaaccgatccggtaatctttgcggacaatcccgcacgattgcgctcgttttccggtagctttgcaaaggacaggacgcgtttcacgcaccgcctaaatccggttttacacccggcttttgcagttcctgttcggatatttgcggatatggtgtaattggtagccacgtcagacttaggatctgatgccttagggcgtgggggttcgagtccctttatccgcacaaaggagccttttcgaagggctcctttttcgttgcccgttcggtgcaaacaagtgcaaattgattgtatatcatcgttttgcaaaggtgtcggcaaattctctgaaccggaagccgaaagcatttcgcagcaaactcgcgggagcacgaaagggagcggaggcgaaaaacgggctgcgcgacggaatttgctcccgagtacgtttgcaatgcactgtttcgctgcgttttacgtcgtaataattctctcttgcggacgttttgttaaccaaaaaatttcaacgtcatgagacaagagacatttgccattcttttcttgatgcggaaaggacgaccgaagaaaaacggattggcgcccatcttcgcacgcattacgaccggagggctccggcaagaggtctacactcagtgcgacagcaatcccgaaacgtggaaccagcacaaggagcgcgcgatgggaacgaacaagctggccattcaggtcaacgagcgactgaacgatttccgcgtcaaaatcatcgacatccgcaccaagctgctggccgagggctatgcggccaatgcggcgcagatcaagcagcgctacctcaacccgacctgcaacacgatgatgctcatcgcaggcctcgccgactacgcgaagcggcggcagggcgaggtgggcgtgcgcatcacgcagcgcacggccgacaagtacgaacggctgctgcgctacctgaaacagtacctcgcccagcgcggcaaggccgaggacattcccgtcgagcggatgaactacgagtttctggacggcttcaacctcttcctgcaaaccgcccaccgctgccgccacaacggggcggtcgccgtcatggactgtctgcgcaacttcgtcctctactgcctgcgcaacgagtggatcacgaaaaatccgttccgctactataaactcaaagaggacgaggtgcaggccaaagagcaccttacggcgcatgaactggaactgctgacccgcaaggagctcgaccaccggctggcccgcatccgcgacgtcttcgtcttctgctgcctgacggggctggccttcgccgacgccgaccacctgcggcgcgagcacctctcgcaggacgacgaggggcggtggtggatccacaagccgcgcgaaaagacctccgtcatgagccgcatcccgctgcttccggcctcgctcgaaatcctgcgccgctacgagcgggacgaggcgtgcctcgctcgcgggcgcgtgcttcccacgccgagcaaccagaagatgaatgcctacatgaaggagatcgcggccgtgtgcggcatcgacaaggtgctgaccacccactgcgcccgccacaccttcgcctgcatggccgtcgaatacggaatgccgatcgacgtgctggccaagattctcgggcactcgaacaccaacatgacgcgccactacgccaaattctccgagacggtcatcggccgcgcgatggaggctttcggcgagcggctggcgtcggcggcttcggccgaataacaggtcgtcgaggtctcggacggatcgacacgaggaaaagaagattaccccgccgttgagcacgaagccggctgcataccgactccgacggcacggtaacggagcgagcggcccttatcgggccgctcgctttggtcgttacggagataatcggcaaaacgaagtttgatgcgtatcgtgaatgacttgcgtccgtgacggaatgaagtcagtgaatgaattacttcgtgcaatgaatcggagctatgatggatatacgtccatgatagcagtacttcatcgatagcagtacatccgtgacagacagctgtcatcgcatgatagcaggagggctgtcattcatctcgcggagcgaagatagtatcccttcggatgctttcgacgtatgtcgcatggaggccgttccaggccgatcaaacgacttgttatcaagcgaaaagcgttgtaatattgcagcccgggaagcaccgcgggccgaggggttcgaaccatcggtcgtaccctgcgtcgtctcgacgcatttaccgtcgccggacggtagcaaggtgtacctttgtccgacaaaccggtgtttgtccgacaaaggtccttctctgcgaggccgggtgccgctcccgagtcgcgcccccttaaaccttgacatatggaagaacagcacaaagagagaaaagccagttacaagtactcgttccggctcgatgagcagcaaaatatccgtttctgccggatgcttgcggaggctggactggaacacaaccgcagccggtttatcgtcaaaagaatcttcgccgaagagtttcgcgtggtgcgtatcgacccgaccttgggccgatatgtgacccgtctgaatcagttttacgagcagatacagcgcgtgggcaacaactataaccagatcgtacgggccgtcaacacgcatttttcgcatacggcgattccgcgacaagtgcttcttctggagcgccgcacgcgcgagctgaaagccctctccgagcaggtcatcgcgctcagccgcgaactttacgagctatggtcgcgcgaatgcgaataataccggaccaattatcatcttcttgcccatcgcggcaaaatgactatctttgtgagggtaaagcggtttttaattcccgataaacgacccgaacgatgaccgaccaactgattttcgtacacgacaagcggcgcgacgcctacgttgacaagacgtcggagatcgtcgggctgcgaccggccggagcgtatgtgtatgtcgattacggcgcggcgcgggtattccgctatcgcaaagagcatgtagtctgttatcccctgctcgccacacgccggcaggtacgcatctacaaggacggaacgttgcaggagccgtacgatacgctgttcgactacgggaaatatgtccggctgggcgccggagagggcttgcgttcgccggcgatcgagaagtcgcggatcgaagcggtcgatgcgcagccgctccccgcagacaaagagcggctactttcctatttcgcggaggttctcgcagccaaagcctctctggagtcggagaccgatacggaagccgcagaggaggttcccgaaggggagaagaaaagttcgatcgccgccctgctcgccgagacgatgcagcgcatcgatccgcaggatccccgtacggcgctgtatgcctatctgaacgggcggacggcggcgtgcgatgtcgacaacgtggccctcgtctatcccttcggctgcaacgccagccagaaactcgccgtgcagcgggcgctgggcaatcgggtgagcgtggtagagggacctcccggcacgggaaaaacgcagacgattctgaacatcgtcgccaatctgctgatgcagggaaaaaccgtcggtgtcgtgtccaacaacaatgcggcggtggacaacgtgcgcgacaaactgtcgaaatacgagtacggggcgttgatggccgaactgggaaaccggaccagacggcaggcctttttcgcggacaaacagcaggatttcatgcccgaccctacgtggcggttgccggcggaggaacgcacggccctgcgaacgcggctgggcgagctgtcggcggccatagacgagcttttccgcgtcaacgcggagctggccgacctgcggacgaaacgctcctatgcccaatgcgagtaccgtcatctgctgtgggaacaaccgctggacgaagcgcggatgcggcgggtcgaccgctgtttcttccgtccgatcgacagccggcgtgcgctgtcgttccggcatctcgttaccgagaggtggcagggcggaaggccgtcgctcgctttgcgggccggactgctgttccggtgcggcgcgtggcccgggaagcggctgttcgcggatgcggagctgctgcccgcctatgccgatcgcaagttctacgaaacctatatcgccgagctctcggcccgcatcgcccggctcggggcaccgtccgacgagcagcgtgcgaagagcctgatcgaagcatacgggaaggtgtcggaagcgctgttccgcgatatgctctaccgcaaatacgaacgcctgaacgaagcgcggcaagaggagcggcccccgttcacgatgcagaactaccggacgcatttccgcaccttcgtcgaacgctatccggtcgtgctgagtacgacccattcgctgtgcgcttcgatcggcgcggggcacctgctcgactatgtcatcatcgacgagtcgtcgcaggtcgatatcctcacggcggccgtctgctgcgcctgttgccggaatatcatcatcatcggcgacagccggcagctgccgcatatcgtggaggagcagctcagggcgaaggccgaggagctgcgcgacaaacatcgggtgcccgacgcttacgattacgtgcggcagaacatcctctcctccttcaaacgggtcttcggggaacggctgcccgtcacgctgctgcgcgaacattaccgctgccatccgctcatcatcgacttctgcaaccggaaatattaccggaacgagctgctcatcatgaccgaaccgaagggcgactatccctttacggtcctgacgacaaccgcctcgaaaacctactcccataacggccggatctacaatcagcgccagatcgacgccacctgcgactggatcgagcggcagcatacggagtacgccgccatgcggttcgcctccgatgcgaaacgcgaatcgccggccgaacggatcgccgaacggctcatcggaggaattctcgccgaggaggatcggttttccgccatcggcgtccaccgacactaccggctgtacgatctggtcggacggaacgtcgagctgtccgacgaggagcgcctcttcgtccgccgccgctcgcatctcgactttctgctctacaaccggatggacaacacgccgattctggggatcgaggtggacggcgtgctccaccaccgcttcgacgaggtgcaggtcgcccgcgaccggcgcaaaaacggtattctcgtcaagatcggcctgccgcttctgcgtctctccacggacggcagcagcgaaaaggagcggatcgtaggcgcgctcgaacaggccatgcagcaggggtgagtgccgagcagcgacaaatccgcaaggcgatccgagaccgacaggatacggttcgcaaacagcgatgagcagaaaattcacggaacgaagccgcaaggccgaaggaggaatatccaagacataacgattccccggcagaccggagttatcacgcttttccgacggccaatccgtcagctgttttcactccacatgtcgcactgcttcatgatcgtactcaacgcatcttcctgtccctcgggcggataatcatacttcctgagcagtcgtttcacgatccgacgcataccggcacgggcgctctccttgaggttccagtcgatcgtcttgttgcagcgcagcgcatcggtcagttcccgtgtaatggcaaccaactgttcgttcgtatagaaatcgcgtacggcctcgggtttggtcagcgcatcgtaaaatgccagctcttcgtcgttcagatcgagcgctttgtcggattctttgccgtgggcgatctcgtgggcgattttcagcaactcctgaattacctcctcgttggtcagcaaccctttgaggtaattgctcatggcacgggacagaatctcggagaatttttcggcccgcaccgtattggtccgttgataaattcgcacctattcggcaatcagcttgcgcaacagttcgacggcgaagtttctctccttcatccgggagatctcttcgagaaatttcggatcgaacagcgaaaactcctcctcgacgtcggagaagaggttgattacaccgtcgctcttgatgctctgtttgagcagctcgttgatccgtgcgttgatttcgcgcagcgacattttgcccttgccttcgatgcgcgtcaacagcgtgcgcacagcttcgaaataggccgcttcgagacgctgctcgtagttcaacaaactctgacagagcgacaacgcctgccgcaacagcagcgcctccttgataaacagcttcttcggctcctcgcgttcgggagcttgcagaaaatcgactcctccgctgatcgctttggcccgttccagatcggatttgccgaaaaaggccgtatagtcgaacccgtgcaacaaatcgaaacatcatacaatctctatctaattgaaaattaaacagttatttctgtttaactaatatcaggtaacgatttagaaacgagcgaattacaatattctgttttcttttgcctctgtcaaagaacgattctttcaatgcaaatatacactttacttgtgacaaaagcaatctttttctacatttaatcgacttacagtcagccttaaagagggtatctggtctcattccatcttcttcctcaaaaataacatagcagtctaaattggtttatgtatgggataggtcttgttcattcgatccggtagactactatacataaaagtataaaggcgagatacgacaaggagatgccatgcttttgtgtaaggggaatctctcttagcttatcgcagaccatgtatagctaagtgttttgagaataaacagtctgtaaaaaacggaaagacaccgattatgggccgtatcaccatcaatggaacccaagccggtttcagttgtaagaaagaagtgtccctcgctttgtgggacgtcaaaaccaaccgggccaaaggcaagtccgaggaggcccgtacactcaatcaggagcttgacaatatcaaggcgcaaatcaccaggcactaccagtacatctgcgaccacgacagttttgttacagccaagaaagtctataaccgctatgtcggcttctcagaggaatgccacacccttatgaaccttttcagggaacagctggaaccgtataaaaagaaaatcggcatagagaaagccgaaagcacctactgcggtctggttgccgattacaagagtctcctgcttttcatgaaaagcaagaagaatgcagaggatattgtcatcgaagaacttgagaaatcattcatcgaggattactacaactggatgctcggtacatgcgctttggcaaactccactgtcttcgggcgtgtcaataccttgaagtggctgatgtatatcgcgcaggaaaaaggctggatacgggttcatccgttcgcatcattcgagtgtatgcccgaatacaagaggcgttctttcctttccgaagaggaactgcaaaggataatccatatagaaccgagatacaaacgccagcgtgccatgcgcgacatgttcctgttcatgtgcttcaccggtctttcctatgtggacttgaaagccataacatacgataatatccataccgactccgacggcggtacatggctgatgggcaaccgtataaaaacgggagtggcgtatgtcgtaaaattattgcccattgctatcgaactgattgaaaaatataggggtacggatgaaaagaaagactccccgaatgtgtctttccggtaggtgaatacaatgccatgcggctcagtcttggaatcataggcaggaaatgcaactccggggcgaggtcaccccgcacatcggacgccacgcatttgccgttctggccatactcaaggggatgctgctggaaactcttcagaaagtgtttgggcataagtccatcacatacgtcctgcgcatccattcacttgtccggcgcaggcggggcaatctttttctggaagtcgcccatctgtacgaccagcgtgctgaccagctttctcaactcctaatacgcgcttgtttcaataattgtcagttccatactaaaattctttttaagattctgaatatgcgacaaagtaacgcacatcctatatcctttccaaacagataatatcagagtcttccgttggcgtgcattggcgtatccaacgttaaaagagaaggtccttcacctgcatccatgcggcaacggaacttccattcccttacttgttttccataaatttataggattaatttctggtgcatgatattaatagtcattattctgtctgctttttttgcttgtataattgcagctaacggttatctattccagaacgcattgctatggaaaatggcaagctgttttggtgctttatggatattgtgtatgataattaccgtcttcgtttgtcgtaaacttgaatgctctaattaaagcgacacggttatcatgctttgtgtgttttatcgtaaatattatgtgaattgtttggatatgacatgtaatatagataattttgcagccggaaaatggtttcgggaggtttacgccttccgaatgaaaagggaacccggtaaaaatccgggacagtacccgctgctgtgagtccacaaaaaacgaacatcgaacttttgccattggtgtaataccgggaaggcacgatgaccgggacgagtcagaagacctgtcatgaccggaatgagatttacacctgcgggatatacaggtcgtaatcaaataaggaatagctcatcggccattcaatatttgaagacagacatattcccgttcgtgtaagtccgcacgaacgggatttttttgtgtttgttaataatatgttttacattaaaacgagtgacctttgaaaagaaaattacgctttctggcaggtgcctgtctatttaccgcaaccgccttgttctccggctgtagctcggacgatgactttttgatggaaccggtttattccggaactccgcaaacccgtgctgtgacaaatccggacggtaccttgactatcactttcgacgatttcgattccggcatgttagcaggacctacctcggccggagaaaatctttattcgtaccaagggtatcctcaagtaaccaccatttacgacaatactccggaagaatatctcttcctttcaatgtttaatactgtaggtggaagcacagagtattccagcggcggcatcgcactttccaactggaacatccgctccaatcagtcgggaaataccggagactggtggtattcttatctaaaccaatgttctgtctataacactgcggtggaagcggaaggacagaataaggaagccgggcacagcggttccaatttcggtgtcgtttacggatatgtggatgcttacaatcaggcatggatggctaaaccggaattttatttcaatgttccccggaaattggtcggcctgtggatctgcaacacctcatacacttatggtgtcattacttatggtaatcagttcggttctacgggggtagcgactcctctgaaagagatgaaagggtatttccaagtgaatctggaatgttatgatgcgaatggcggtctgatccgcacttacaaacgtcttttagccgattatcgtaacggccaacaacaggttgatcctatcacgacatgggattattgggaaatcaatgccgaaggggtgcaaagtgtgaaattcaacttcgagggttcggattcgggagcatacggtttgaatactccggcttatatctgtatcgatgatatcaccatacaataaaaagaatacagggatatcccttctgtcgggggtatcactgttatttttctaaaatccacacatcatgcatcgtttttactattttattatttctgcctgtatgctgttcacctcctgcaacaaggatgaagtcattaccgaagaagtaggaggacaacctataatagaacttgacagcgagaccggtatttacacggtcaaggtcgatcacgaattgactatcgccccgacataccagaatgttgaagatgctctttttgcttggacgatagacggtacgctggtttcttcgggtccgtctcttcaacgtacatggaatgaatgcggggatttttatgtcaaactaagagtagacaatgcggaaggctatgccgaagaggaactgaaagtagaagtgaaagaactcacccctccggtcatctcactggcactaccttcgcaggggctaaaagtcgtccggaataccgattacacatttactcccgatattcagcattcggatgtcgaagggttcaaaatcgaatgggtacgggaaggaaaaatcgtttccaccgagaatacttatactttcaatgaaaaagaactcggtgtttatacggtgacaatcaacgcttccaatatagatgggacaacaacgaaagacgtaagcgtagaggtcgtggaaacgatgccctacgttgtcaaattcccgaccccgtcttaccagcaaacatccacggacaggtacacttttgccgaccgccctgttttcctgcgtccgttgttggagtatttcgacaatccccgttttgagtggagtgtagacggtcaggtcatggaaggagaagtgaaacgcatgttcaagttcacgccgtccgcacccggagaatacaccgtctcctgtactgtgtcggaagacacaccgacggaaaaaataagcaggaatatcgacaaagggaaaacggctgtcactgccaccgtaaaagtcgtttgtgtggacaaaaaggaacaagacggcttccgggcttcgggaagttccaagctctggaataaagtctatgaatataccccagctcccggccaatttatcaacgagacgagcacgataggtggtatgaccggcaacgaaacatcccctgaagcggctgtcgcatgggcaacacagcgtttgaaagacaaactgcacgtctctttaggttctttcgggggttatatcatcgtcggcttcgaccacagtattcctaattcgggtaaccaatatgatttctgtgttcaggggaacgcctttgacggcagttccgaaccgggtatcgtatgggtcatgcaagatataaacggaaacggattgccggatgacgagtggtacgaactgaaaggatctgaagcaggcaaggaagaaacaatacagaactttgaagtgacttattaccgtccggaaggcaaaaaaatggatgtccaatggatcagttccgatggtagaaacggttgggtagactatctgtccgcttatcatacgcaggactattattatccggcttggatttcggaaaacagttacaccctgacaggcacttgtctggccgcccgcaacacccaagattcacaaaccggttattgggataatcagagttatgactgggggtacgtggataatttcggaaacgaccagatagaaggcggcagtacggtggatggaagcggtcaaaggaacggtttcaaaatttccaatgccatccatgccgatggaacggaagccaatctgcaatatattgactttatcaaagtacaatgcggtgtcttggccaaaagcggctggctgggcgaagtttcaacggaagtattttcttttgaggatttaaccaaataataaaaattgcaagtatgaaaaattattttcttcccatgctcctatccttgttctttttgggtgcgtgtgacaaaaacgatgaaattatacctgaagatgcagatgagaatttcatcacgtcagttgtaatgaccgtggacgggaaatcgtacacggccgacattgcggacaatacagtaacaataaccgttccctatacggtatcgctgaacaatgccgaagtggaattcaagtacacaacttctgcaacaatcatacctgatcctgaaacggtaacggactgggataacgaacgaaccttccgggtgacatcctataacggagatgcccgcgaatatgcctataaagtggtgaaaagcgaaatagaatctgacggagatgtggagttgaagaccaccgaggaggtagcttcttttgccgcaaccaaaacaaccgttgtcaaagggaacctgattatcggctctgatgcggaagaggcagaaaaaatcactgacatatcagcattggcatctttgaaagaggttactggcaacattgtcattcgtaacagttacaacggtgcagacttgacagggttggaaaatatcgtttcggccggaggtttgcaggtaggttcggccgatgtcgcctcgaaagctacggaacttcacatgatttccatgaaagcattggaaacactctccggagacatatcggtatataacgaccaagtgacgtatgtcctattcgagaaactggcaactattggaggaagcgtggtgttcaatgcgccgtcgttacagagctttgagtttccggttctgaccactgtaggtcaggacctgaatatccaaggactcaatgaagaaaacaaggctgccggaacaatcgctactttagagttaccggaactgacaagtgtcgtaggagtcttgtccgtaaacaatcttgccaagctgacctccatgaacttccttaaactgaaagagacaggtggtcttgatttccacaccgtccccgtgatgttggaaactatcaatttgccggaaatcgaaacagtaaacggaagtattattatggaggccaatatggaagctcctcctaccggtagttttgttccccaacgaaatgacgtgcttttggctttcggtggaatggacaaactgacaacggtaaaggggcaaataaagataaaaaatttcacggcactcaaacaacttcctgactggagcaaaatcaccacacttggaagtatcacgctggattatcttgaagatgtgagcggaacactgctgttgccgaacgcccgatttgaaaccttcggagaaacagcgccccagattgaaattataaacaaggtgcagctctccaaaattgaaacagccgaagatttgtcaaatgtaaattttgtcatcaccagtctcacgaataataagttccctgaaatcacgttcaagaatatcaaagacttcacttgtaagccaaccaccaacaatatcgattataccatatcgacaattcaacatgtatatggaaatctaaatgtgacaggccaaatgcgaagcaatgccaaatttcccgacttggaaatcatagatggatatggatacatccaaataccaatgatggggacagtcacaatgtcatccttgaaagaagtaggaggccagttctatttatctggaaatcttaccggttgtgacttacccttggtgtccaaagtatgttgctcaacctctccagtatatcatagcgaaggaatgggggcgttcgcaataactttacaaggtaaatcgttaaaccttccagaattgcttcatgtaggaggtgaagggttgtttattaatcaagcaactggcattacttgcgacaaattgcagacaattgacggtacgttacagataaaaagagcaacttctctttctcaggaaacactttccatggagaagttggagaccttgcatggggttgtttttgacggtttgacgaaatttaccgactacactttcttcggcaagttcatagaaaacggaatgattacgggggaaagttggagcgtgacgaaatgtgggtataacccaaccttccaaaatatgaaggacaaacaatatacgcagcaggattaaaccttataccttaaccagagtacccgtaatgattcgggtacttttttttatccgaatgacaatgagcagaacaatacaacggatttgcctttttcttttctgcctgccagttttcggcagttgcatgaaatgggattacggagagatggaagatttctctgtatcggcctctggtcttttcattaccaacgaggggaatttccagtacagcaatgccacgctttcctactacgatcccgccacgtgcgaagtggagaatgaagtgttttaccgtgccaacgggttcaagttgggcgatgtggcccagtctatggttatccgggacggtataggctggatcgtggtgaacaactcgcatgtgattttcgccatcgacatcaatactttcaaggaagtgggccgtatcacaggtttcacctcaccccggtatatccattttctgtcggatgagaaagcctatgtgacgcagatatgggactaccgtatcttcatcatcaaccccaagacatacgagattaccggctatatcgaatgtccagacatggacatggaatcgggttccaccgaacaaatggtacaatacggcaagtacgtctatgtgaactgctggtcgtaccagaaccgcatcctgaaaatcgacacggagacggacaaggtcgtggacgaactgaccatcggcatacaacctacttcgctggtcatggacaaatacaacaagatgtggaccatcacggatggcggttacgagggcagcccatacggttacgaggcaccgtctctctatcgtatagacgccgagactttcaccgtagagaaacagttcaagtttaagctgggcgactggccttcggaagtccagctcaacggtacacgggatatactttactggatcaacaacgatatttggcgaatgccggtggaagccgaccgtgttcccgtccggccttttctggagtttcgggacaccaaatactacggccttacggtcaatcccaacaacggggaggtatatgtggccgacgctattgattaccagcaacaaggtatcgtgtatcgctattcgccgcaaggcaagctgatcgatgaattttacgtgggaatcattccgggagctttctgctggaaataacgaggaaggaggacaaaaatgaaaagacatcttattctattgttcgtgggggtaagcctgccctttctgcttgccgcccagcagaaaaattccgtcagcattaccaaaagggtactacgtattccggaggttacggtggtgggcaaacgacctatgaaggatataggcgtgcaacgaacccgtttcgattccatcgccatgaaagagaacatcgccttgtctatggccgatgtgctgacattcaactcatccgtttttgtcaagaactacggacgcgccacgttatccaccgtggctttccggggtacctctccctcgcatacccaagtgacgtggaatggtatgcgcattaacaacccgatgctgggcatgacggatttttccaccatcccttcttactttatcgatgatgcctcgctgctgcacggaacgtcatcggtaaacgaaacgggcggcggcttgggtggtctggtcaggctctccacttctccggccaaccatgaagggttcgggttgcagtacgtgcagggagtggggtcgttcagcacgttcgacgagtttctccgcctgacctacggtgacaaacactggcagtcctccacccgtgtggtgtattcctcttcccccaacgactacaaataccgaaaccgggacaagaaggaaaacatctatgacgaggacaagaacatcatcggttcctattacccgacggaacgcaaccgcagcggggcttataaggatctgcacgtcttgcaggaaatttattataacacgggcgaaggcgacaagttcgggctaaacgcctggtatatcaattccaaccgggaactggcgatgctcagcacggattacgggaacgacatggacttcgagaaccgccaaagggagcagacgtttcgcggcgtcctctcgtgggatcgcgtgcgggagaaatggaaggtcggtgtaaaaggcggctatatacacacatggatggcctatgattacaagcgggacaagggaaacggcgaaatggcttcgatgacccgctcacgcagtaagattaacacgttctacggaagtgcggacggggattatgctccttcagagaaatggctgttcacggccggtgtttccgtacaccagcatttggtggaaagcgcggacaaaaatatcatctcgcaggaaggtaacaaggctgttgtcgggtatgacaagggacgtgtcgagttttccggttccgtttctgcgaaatggcggcctgtcgatcgttttgccgcctcgcttgtccttcgcgaggatatgttcggtacggaatgggccccggttatcccggctttcttcatcgacggggtactgtcgaaaaaaggcaatatcgtggcgaaagcatccatctcccggaactaccgttttcccacgctgaacgacctctattttctgccgggcggtaatcccgacctgaaaagcgagcacggcttcacatacgacgtggggttgtcgttctcggtggggaaagaaaatgtatatgctttgagcggtggtatcaactggttcgattcgcacatcgacgactggatcatctggctacccacaaccaagggattcttctcccccagaaacctcaaaaaggtacatgcttacggggcagagaccaacgcccaccttgatataatgctcggaaaggactggaaactggatatgaacggaactttctcgtggactccctcgatcaacgagagcgaaccgatgagtccggcagaccaatccgtcggcaaacagttgccatacgtgccggagttttccgcaacggtgaccggacgtctgtcatggcggacatggagcctgctttacaaatggtgttattacagccagcgttataccatgtcgagtaatgactataccctgacgggctatctgcccccttacttcatgaataacgtgacactggaaaaacagctctctttccgatgggccgatctgtcgctaaagggcagcatcaacaacctgttcgatgaagaatacctttccgtattgtcccgtcccatgccgggcatcaatttcgagatattcatcggcataacacccaagttcggaaaaaacaaaaatagtaaacgataatctgcatcaatatgaacgcattaaagaatttaagcctgattttgttgctttctctggcatttacaggctgccacaacaaaagctcaaaaatcaatgatttcaacctgctgctttatgctcccgaatatgcctccggcttcgacatcaaaggggcgggcgggaaggaaagcgtactgataaccgtcaggaatccctggcagggagcggacagtgtaaccacatggctgtttatcgtccgcaacggtgaagaggttcccgaagggtttgcaggacaggtactcaaaggagacgccaaacgcatcgtggcgatgtcttccactcatatcgccatgcttgacgcaatcggtgaagtccggtgtataaccggcgtttcgggaatcgactacatttccaacccagacatccaagcccgccgcgacagtattggcgatgtcggctatgaagggaacatcaactacgagttgctgctctcgctcgatcccgacctcgttctgctctatggggtgaacggcgcaagcgcaatggaaagcaaactcgaagaactcgacataccgttcatgtatgtcggcgattatcttgaagagtcgcctctcggcaaggccgaatggatggtagtgctttcagaagtcacaggaaaacgtgagaagggtgaaaaagcctttgccgcaatcccggtcagatacaacgccttgaaaaagaaagtggccgacagtaccctcggcactccttcggttatgcttaatgttccctatggcgactcgtggttcatgccttcaacccaaagttatgtagcccgcttgattactgatgcgggaggccgctatatctaccagaagaacacgggaaacgcttctatccccattgacttagaagaagcatatctgctcgcgtcggatgcggacatgtggctgaacgtgggaatggcgaactcccttgacgacttgaaggcatcatgtccgaaattcaccgatacccgatgtttcaaaaatggagaggtgtataacaacaacgcccgtaccaacacagccgggggtaacgactattacgagtctgccgtcgtgaatcctgacatcgtgctccgcgacctcgtgaagatattccatcctgaactggtgcaggaagagtgtgtgtattacaagcaactgaaatagatgcgttcccgttcgactatattattctccatattgattacgctcacggtcggtctttttttactggacttggccgtgggagctgtcaacattccgatccgcgatgtatgggcagcactgaccgggggaaattgttcccgtgccacggaaaaaatcgtactcaacatacgcctcataaaagctatagtggcactgttggccggggctgccttatcggtcagcggtcttcagatgcagaccctcttccgtaatcctcttgccggtccctatgtccttggcatcagttccggtgcaagtctcggtgtggcacttgtggtacttgccgggatcggttcatcaataggcattgccggagcagcgtgggtgggtgcggctgtcgtgttgctcgtgataactgccgtcggacagcgaataaaagacatcatggtaatcctgattctgggcatgatgttctcatcgggcgtaggtgctgtcgtgcagatattgcagtacctcagcaaagaggaatcgctgaaagcctttgtcatttggacgatgggggctttgggtgacgtcacctccggacaacttctgattcttgttccatcggtgtttgccggactgctgttggcggtactgaccatcaaaccgcttaacctcctgctgttcggagaggaatatgccgtaacaatgggactgaatattcggcgttcacgcagcctgttgtttctctcgacaacgctgctcgccggaacgataaccgctttttgcggtccgataggtttcataggtctcgctatgcctcatgtcacaagaatgcttttccaaaatagcgatcatcatgtccttctgcccggaacaattctttcgggagcatcgatattgcttctttgcgacatcatttctaaaatattcaccttgccgatcaacgccattacagctctattgggaatcccaatcgtcgtatgggtggttttacgcaacaaatccatcaccgcatgatagaattacagcatttttccataggttacaaagaaaactcgttgctccacgaggtaaatgccacgataaaaaaaggtcaactgacagcccttatcggaagaaacgggacaggaaaatcgacgttgctccgcgccatagccggtctgaaccggtgttattccggaaaaatcattctcgacgggcacgacatcgcctgcatgaaaaccgaagatatggcaaaaacgctggctgtcgtcacgaccgagcgcacgcgcatcgccaacctgcggtgcaaggatgtcgtagccataggccgtgctccttataccaactggataggtaggatgcaagaaacagataaggagatagtcatgcaatcgctcatttcggtgggaatggaggcttatgcaaaccgcacgatggataaaatgtcggatggcgaatgccagcgtgtgatgattgctcgtgcattggcacaggatactcctatcattctccttgatgaaccgacttcctttcttgacatgcctaatcgctacgaacttgtggcgttgcttcgtaggcttgtccacgacgagaaaaaatgtatcatgttctcgacacatgaacttgacatcgcgttgtccatgtgcgattcgatagcattgttagataccccgaatttaagttgcttgaccgcgtctgaaatgcagaaaagcggatacattgacagacttttccaaaatgaaaacatccgtttcgactccttatgcggtacaatgattttgaaacaatgagtatatacactgtagaaaattttacttcagacatcactgttgaaggatatatcgccgaattccgtgacgaaccacattttcttgaactttgcaaacaatgtaccaattacggtaaaagttgggggtgtcctccatttgattttgatacggaatcgtttctccgacaatacaagtatgcacatcttatggcaacgaagataatccctgaagacaaagatattccgattgaatatacacaaaaactcattttaccggaacggatacgaatcgagagcgaattattggatatggaacggaaatatggagggcgttcatttgcctatataggtaaatgtcttcactgctcagataacgagtgtacgcgtaactgcggcacaccatgccgacacccggaaaaagtgcgtccgtcactcgaagccttcggatttgacatagccaaaacgctttctgaactttttaacatcgaacttctttggggaaaggatggcaaattacctgaatatcttgttctcgtaagcggattttttcataatgaatacgaactttgcaacatagcatactaatgattcggacatgaaataaacagacaaactaaccacattcggttcaatctgttttgtgatttcaaatgaattatagttagatatgtaaaaagcgacgctggagcttgaaataagtaacggtttatcggtgtattctccgttaaaccgtcctgttttcgttaaacgaaaacacaacttgctgtcccctaatggggacaacattctccaataggaattgtgtatcagcccattgtacggctattctcctgtgattttcgggtcatttccatcaggcatttgccggctgctctccccataaaaaggtggctgtctctcctgaatcatgtgacttacgcccataattcaggaataagggagacgtatgtactggaaatctgccctttccataccctattctccattaatggattgttatttttacacttctgcaaatggagaatggcaggtagccgtatacaccttattgtttttcttcattgtctccattaatggattgttacttttacacatctacaaaaggagaatgggctgtgaaccgtatatgccttatggctttccttcattgtctccattaacggattgctacttatacacatctgcaaatgaagaatgggcatgtaaccgtgtatgtcttatggtttcttttccttgtctccattgatggattgctacttctacacatctgcaaatgaagaatgagcatgtaaccgtgtatgccttatggttttccttcattgtctccattaatggattgtcacttctacacttctgcaaatggagaacgtgcatgtagccgtgtacgccttatgttttttcttccttgtctccattaacggattgatatttttacacttccacagaccgataattcaagaatccgtatcaggacggatgcatgctcccacacctgcccataaggatttgaaaggggcggtggacaaggaacggaatcccgccgcttttccacgccgctacggacagcaggattctgacgtcactcctgcatgggaagaaccatccggatggaaccatatgttcgtccccccgtcatgtgtatcatgacaatccccgactttggatgactataagtgacaggtggttccgttccgtcctgtcctcttctttttttattttgtattccgaaacaatgccagttgtgtaatttaataatttaagattttaagacaatggattcagaaaaggaaaagaaccggctttccgatatcgttctcgagagggtcggactcacgggaaaccttctgtcagctcccgtttccccatccccggaaccggcggtggatatgccgggtcatgaaaggcaggtccgtgcagggaaagtgacagccccggaagaatacaagaggaggtttctggttcccgctcccaagtctgtggagtggaagaccgcgtatattgacgggaggctgcaccgccggatcgccatgctggtcagggccgccggttgcggcagcatctccgggtttatcatccggctgctggagctccatatggaggaacatagggaggatatcgccgccctgctcggtgaggtctaccgtccctgggatgaggacgggcagccgggagaaccggcccgccgataaaatgttgtcattgtccaagaagatatatcatgacaggaaagaacgtaaaagaccggatgggtcccggcgggatggacgcggaccgcatccgtgagatcatgggggaagcacctgcctgtccccggaagggacgtggaacgtccggtaacgacataatgcgtcccgcaaggaaaagcggccccatgcagccgtccgtctatggggaggaatacctgcatggcattgcgggcgtgcagcgccggtcactgcatattcctgccgccctgcaccggaaactgtccatcctggcgggagcctcgagaaatggaacggtcacgctggaggggttcatcaaccaccttgtatcgcggcatctggaagaatacagggaaacggtggagatgattctggaagagtccctgcccgaccggtcataatagtgtttaacatttaatgcaagaagtatgatgaaaaaagaaaaagagttgttggttgccgtcgccagccagaagggtggcgtgggaaaatccgtctttacggtactgctggccagtgtgctgcattaccgcaaaggcctgcgtgtggcggttgtggactgtgactacccgcagcacagcatcgccctgatgcgtgagagggacatggagagtgtcatgaaaaatgacgacctgaaggtgagcctttaccggcagcacgagagaatccggaagcctgcctatccggtcatcaaaagcgatccggaaaaggcggtggaggacctgcatcgttatatggacgaaaagggggaaactttcgatatcgtgcttttcgaccttcccggaacgctccgcagcgagggggtggtctatactgttgccgcgatggactacattttcgtcccgctcaaggcggacaacatcgtcatgcagagttccctgcagtttaccaaggctctggaagaggagctggtcgccaggaagaactgcaacctgaaagggacctggctgttctggaacatggtggacaggagggggcggaaggacctgtatgacgcctggaaccgggtcatcgacaagatggggctgcggctgctgtcctcacacattccgaacaccctccgctacaacagggaggcggaccctgtctgcaagggtgtcttccgttccacgctgtttccacccgatccccatcaggagaaaggctccggccttcctgaactggtggaggagatatgccgtaccatcggcctggaggaacccgataccgaccggtagcggatgtcagggtatagacaccttaaataaggacttttagcctaagataaagtaagctaatggcgtgataataaggatcttataattacgatatctcctgtaaaagcattaccttagtagtgtaataataaaggaggtaataaattatgaacgagcaaatcagaagcattttagcacaagaaacgacaaagacgagcaagatccggcaactgtatcttctgggtgttccccgtgcggaaatcgcacgaatggtgaccaacggaaactacggctttgtagtgaacgccctgcgccgtatgagtgaatgtgagtgcggtccgaacatccaaccgttggcagccgcaccggattacactttcaaccgcaagttcggtatcgagatcgaggcttacaactgttcccgcgaacggctcgcacgcgagctcagggagtccggtatcgaggttgtggtggaaggttacaaccataccacccgtccgcattggaaactcgtgacagacagtagtctgaacgggaatgacaccttcgagctggtcagtccgatccttgtcggcgaagccgggttacgtgaactggagaaggtctgctgggtgcttgagctgtgtgatgtgaaggtgaacgggagctgcgggcttcacgtgcatatcgatgccgccggtttcagcatggagacctggcgcaacctggccctgagctacaaacacctggaaccggtcatcgacaggttcatgcctgcatcccgcagggacaactactattgccgtgggctgggccatgtctctgacgggatgatacgttccgcccggacggtggacgagctgaaaggaaggatcggtgaccgttaccacaaggtgaaccttgaggcctactcacggcacaagacggtcgagttccggcagcattcgggaacgaccagcttcacaaaaatgcgaaattgggtgctgtttctccacaaattggttacctttgccacaaggggacaggtgcctgcgggcaccgcgctccaggacatccccttcctggatggtgaacagaaactatattataaactgagaactaaaaaattatcggcatgaacaggcatatgtatattttggcggatggcggcaggattgccgcctccggcccttccgagtttgtacgcctcctgcgtgagggcagctggtttgacagcgggtgcaccgataaggagtacatgatgaatttctccgggcggtacagggaactgcacggggtgacggtgaggaccgacacgccggagcatttcatggacgacctgaaaaagtacggttacatcaagggttgagaggcccgttcctttattgttacgttccctgccggttcattcatctccggtggggatttttttcttttttcacggtatctgatctccgccgtatcctgttttccggaggctggtttcacgacctccttcctcaatcatttttttctcttttcatactgctatcaacggattgtcgtacttttacacacaatcccggcaatatcgggaagaatcccgggctctcgccggactgccatttgtcatatcttttgccggcattgactatttatgtctatatatgactataactgacaaggtattccctcatacatttactctttttttctttgcggcgtaggacgacaatccgccaccgggaacgtccgcctgaccaaacacccggttatcacatggaattaatgtataaatcagaagttatggttatggacagcattgaaaggaacccccaaatccgtatcatatcgacgggaagaagatgccggatatacgttgctgctaaaggttcatatttgaaccgcatttccggggaccggaaagaggtggcgcccacaaggacttttcatcaccggtcggaaagtaaaaaggcgataacggagaaacggtaaaaaatatattgaactccttcttcaaacagctccggagggggagtcggaaaccacgacacccagccggaagtgcctttggaaagtattttgaactgtatttcaataatttgagtttctgacaggaagctatttaaaatggaaagaaaaatggactataataagaaaactgaatatggttaacgataattagtatatttatgcagttgtcgtgcatggaaagctcgtcggggctgactgctcagcccctattcttatggattacgcaagcgaattttgataatttctcgaaaaaaaagcatccgccctaattacagcgaacataatcgtaactaatttcgctctaactgcattcagaaccgacatcttattttttccctcttcgacctttctgtcataatatttcttcaatggactatttttcacttgtgaaacagatagtgccgccatatgtagcaaatgcttgatgcttttgtcagccctattagatactctatttttagaacgttggctacttcctgacacatagacgaacggaacaactcctgcatgacagcaaaacttcctgggatcagtaaaagaagtgaaagcatctgtttccatgatcatcttcagtgcaacacgttccccaactccatccacagacatgagtaaatccatttgatgagcaatgacaggtgcttgatttataagttcttttatttcaaggtctatttgtgctatgtaatccgtaaatgtattgataatcccttcaactctattgcatttagcaatatatattgagtgttccatatagtctacctgatcttttagctgggattgatatttagccctatctgcaacaagcatactgcgttctgttgataagtttttgagtttttgtattataagctctgatgcggtatacggttgtaggcaatcattatatctttctgcatacattgctattcggcaggcatctattttatcatttttgccacgaggtattccatgacaatattttattttagctgcatcttccaaacataagtagactcctatactttttgttgcacagaccaaaggataggtatattgccctgtatgttccgcacagacaaccaaactgtcctcagagaggaaaaatttctcaaacgttcttgttaaccaagatttaatagaggatagatcattaggaataacatcataaaggatgtccttaccgttactccttaaacataaatccaattttttcttactcacatcaactcctaaataaaaaactttcatacttttgtttttgaacattaaacaaaaaagaaaggacctgaacttgacctaataatcttaaacaggtttactgaaattcttatatgggtttgagttcaaggaaggagcaaaaggaccgaatagggacttagacttgacttctattgccgctgatggttttccttttgctttcctttcaatatcaattcaaagataaatattttgatgctgcaaatctaaggttgccgcatggcgttccctccgcagatgagtatttacggtttctcggacttgaacccatcgacatacggttttccttgcgtgaccacagcgaaggcttgccttataagtttgttggcgacagcaacgaccgccaccttgcctggcttgccgttagaccgcaaacggtcgaaacaagccttgcactcggcattacacctgagtgacgagaaagccgccacatagagctggcttctgaggtttgaatccccgttctggttgatgtgacctttgacattgactgacgtaccgaactgttggtaaataggtgacaggcccagataacgggtcagttgcttggcattatcaaaataggtgaacccgcctgtggccacgataagcgcggctgccagtgtaacaccgatgcctttgatggaggtgagcaagtccatctgtttcctgtactcgccttacgccaaggaagtgatattctcttccattgccttgatttgcttctcgaggaaagcaatcgtcttttcgatggttttcttgcattcagggtcaaaagaagaaagaactccatcgagcctttaaggttgcgtgttgccacaagttgcttctttagctggcgtagtaccgttcgtttctgcttcagtacgaggattgagtcactgcggagcttataaggatccggctgcatcctctccccgtacagggctatcagacgggcatctatctcgtccgtcttggtgacggagagcatggcacgggcgaagttctttatcttcagcggattctcaaggctgacggttatccctgcttcggaaagcagatagacgagcaacgcactgtaattgcctgtggcttctaatactcaatggtgctctgctactgaaatggtttggatgaactcatggacacccttaaccgtggttcttgaatgtttttgtcctgccggtcttggcggacgaataagcgacaacaaaggtcgccttgctgacatcgattccaacgtaggtcatagtctgaaactttaattaaacaacatcactacatcgtgagccatcattacgaatgcgggggctcaaaagcccattgaactatccggtttctgatgtaagagtgtgggggctaaacatttttcacggtctttacgactaatggaaattgaaagttcattaaaaacgaaatggcaaagaattaaatgtaaaatcaacgctctcttaggtttctatagaaaaactatccatattatatatctataaacatttataattagacatatgatatacggatacattagagtaagcagtgataagcagacagtagaaaaccaacgttttgaaatcaagaatttctgcgacaatcaaaacataaaaattgatggttggatagaggaaaccattagtggaacaaaagcctataacaaacgtgaactcggaaaattgctcaataaggtacagaaagatgatttgattatctgcgctgaattgtccagattgggtcgtaatctctttatgataatggaaattctgaatatttgcatgagcaaggaatgtagggtttggactatcaaagacaactataagttaggagaggacattcaaagtaaagtgttggcttttgcttttggactgtcagcagagattgaacgtaaccttattagccaacgaacaaaagaagccttagcacgaaagaaaatagaaggggtaatattaggacgtcctaaagggaaaaaaagtgctccagagaagtacaaactccacgataagaggattctcatacaagaactattgaaagctgaagtttcacaacgcaaaatcgctaaaatttgtaaagtggatagaaatacgctcgctcgatttattaagacttttatggtagaagcataaggagcgttttgacaatacaggcgggcgtatagaattcgccggcgagtttcccttccgcctcggcaaatttcgaaagacaatactcataggcgcgtcccagaatatctttcgagtcgccatgttcgtgcatccggatattcgtgaacagatcaaccacatcgcccaaccggcgcttgtcgagttcgggacgagcgaaattcttcgggagaatatctttcaatcgcttattctccttctcgatcgcccgcatcgcattgtctatcacctggcctatttcgggcgtgtgcgcctcggccgcaatccgctcccagcgggcttcggtcgggacatagaagatattttcggccgtatattcgtccttgtcctcctcgaatccttcgccctcggcgacaagctgccggtatttcgtttcgaacttatcggaaatatatttcaggaaaataagccccaacacaacggacttgtactccgatgcgtcgatattgccgcgcatcttgtccgcggccttccatatttccctctcaaagccgatatcggccgtgttcatggttgccattatgcaataattttatgtaaagatacaaaatccttctaattattcttattgatcagattcaccaccaccttcgtcatcacgtccttctcctcggtgcggctctctgcgatcatcagcgtcagggccaccaacgtgttgttatccaagagacgcgagccgtcgggacggtagaggatgcggttgttctccaagaaccagaggaacaggaacgccgcgatgcgtttgttgccgtcgctgaacgagtggttcttgaccgtcaggtagagcaggttggccgctttctcctcgacgctcgggtagaggtcgcggccgccgaaggtctggtaaatcgcgcccatcgtgctcttgaacgactcgtccttctcgcgggcgaacagggcgctgccgccgaacttgtcgcgcaacacctgcaacgccgccatcgcattctcataggtcgcgcggaacggctcctcagacgtagtggccgatacctccaactgctgataatcgtagcggtcgagcgtatcgaggccgtaggtgtagtccgtaatcacgcgcagcagcccgaccgcctcggatttcgtaacctccttcgcagccaagacatgggagagcaggcggacggtctttttcaactcctccaactgctcggctttcgcttggttattgacggcatacccctttataaggtactctttcagcaccttgttcgcccagatgcggaactgcgtggcgtttttggagttgacatgataacctatcgacaaaatcatatcgaggttataatatggaatcatacgccgcacttgccgtagcccctcatgctgaacatgtgcaatttttgcacatgttgcttcccgctccaattcgcacgacttataaatgttgttgacatgtctgacaataaccgttctgtcgactccgaacaatcgcgcaatctgcgcctgcgtcaaccatacgctgtcgctctccatgcggacttccagacgggtctcgccgtcggccgtccggtaaatgatgatctcccctctgtccatacgaacaaatatagaaaaatccgcctgcatctcaaaattttccggcatttggatttctcgcccgaaatcgctatctttgtactgtcatgcaaggagatacggcggccgcgcaggcgaacgggcaggcgggcgcaagaccgtgcaaaatgacagtaggcgatgcggggacggaagccgaaaaaccgtcgcaattcgttgatatacatcgggcttacattcgtacggaagcacctttatccgcacaaagcaactttcaaaaggatggatttttcgaattcatccttttttatttttatattcgattgacaaataagagaataaagcgatcaccttattcttttccaggttcggcaatcagtgttttcttattatgcaaaatcccttcggaaagagcgaatttaattttttttcagcataaactcacttctgaaacaccttcctatttacattatgataagactattccgacaaaaacaacactcttcttcggaaacccgtatgctacgaatctattttaatccgcaaatagccccacaaaccggccacatcacacagatctcttcgcatcggacctccaggtcgtcgtctgcagttgcaaacaaagatttcaaccgcagacgagcaggatccccctcgatacgatagacggaacaaaacagatagaaacactccgtcataacgaaataaactctcccgtttataacttctccgtccggctcccgcagcaacacgagccaatgctgcaaaaccgttccgaattgatcgtccgtgcataatgcaatttgagccccccgagcctcttcggcagaaagaagcagataccgttctggaacctccttgggcggaaactccgccacggaagagtcccgatatacagggatccgaacgacgaaagcatcgccttccggcgtagcagcggattcggcttcgccgtgcatcaaccaggaaatcggatactgcggaaattttgcatggatctttttagccacaccaaggcttactccataatttccccgcttgatctgataaagattttcgcctcgcggcaacccgacatatctggcgaatgaattgattgtcaacccagaagattcaatcactcgctccaatcttctccaggaggaataatccgtttttttcataccaaccaaaaattactattccgtaggaacaattctcatcctctgatttacagcttctttggatgtatcaatccatatcaggaattgttgggccccggacataaaatgttatggatcggattttgcaccttctcgcatataaaatgaaaagaaggcgcggtgtcaatctactaccgaaggcattgggagcctgtaatcagtcgattgtcctgcgcccttgcctgcccctcccgtcgaaacgagcagggcataataaggacagacaactgctacacctgattacttgtaaattcccaattttacggtaggcataagagttgtttacccttttctatgtctgtcggctatgccgaatcaccgtattcccgcattgcatctgaatcgcctatttgttcctgaacggcacacaccgtcccactacaacaaactcgttgcacggaaatactacgtacaaatatagtattttaattccattgtaaaaaccaggcgttcaaattttcttactaactttgtatgtatgaaaagttcgatcaacttcctgccagcagaaaaaagacgcgatctacatcaacttgtagagatcatccgaaatgaaataaaagactgcgtaatgatcattctttacggcagttatgctcgaaatacatacgtcgattgcgaccgccggcgggattacggagtgacgacctttttcatgagcgattacgacatcctgatcgtcacgcgccgacggctcggattgaaggaatacgacgtttacgcccgcatcaccgaacggtttttcgcaaacaaacaaagcgaattttacacccggccgcaattcatcaacgaaagtatttcccggctgaataaaaacctcgaactggggcaatacttctatcatgaaatcaaaaaacaggggatcatgctctacgattcgcaggagttcaaactggcacggtgccggaagttgaactatgcggaaatcgcaaaaatcgctcgggattattttaacgaaaaatttcaatttgcaagcgattttctgttaggagcacgctactatgccgggttgcagaaatataaaatggcctctttccatctacatcaagctgcggaaaattacctgcgtaccattccgctggtatatatcctttacggctataaagatcatgcgctggaaattctgatggatcgctgcaagacgcacacgctgcaactggtatcggttttccctcgaaatacggaggaggagcggcgcctgttcaatctgttacaggatgcctatgtacaagcccgctacaacaaagatttcaccgttaccagggccgatatcgacgccctgattccccggatcgaactcctgcgcgacatcacagaaaaagtctgttgcgaccggatcgcctattacgaacaacaaagctgacacaccgctgaatcccgccaaagaccggacctgattgatcaaaacgcaggggccgcaaccctgcgattatgccatttaccttcggttataatccccgaatccgttcgatcggaacggcgaggtcgtcctcgattcccaacatggcattgatgagcacgacccgctcgaaaccgcccagatcggaaggcgtaatgcggcgttcggttaaaactcccgcaccgagcaagtactgcctccgcgtgccgttgagcaggaaagtatccggcgtaacgtatttccgtccgtcgaaaaacgccacgttgctgtaactggtatcggtaatcgccccgtcgcgcacgatcaggatctcgtcgcaatcgtcccgacgctgcaaaagacgggcaagggcgctacgatccgcatacttcaagtggtaatccaattcgtcgtccgcagcgaccagccgcagagagcgaatctcgcggggaacatacggcgcaaacgagatctccgacagcgaccggccgtaaacgatccggcacttcaccgttcccttccgatgctgaagcggaatcgaaccgtccgccaaatcgaaattgaaggcgacgccgtatgcttcgcggaccgtctgccgcatacgatgcaaatgaagttcgggacgaacgaaaattccgtcctcgacccgaatggtttctatgaaaagcaactcgtccatcgcaatcagggaatcggcagataaattttggtaacgacctcgtcgtactcctgctgcgggtcgctgtgcacggtgatgccgccgccgctgcggaaatagaaccgcccgttctcgcattcgatatagcggatcattaccgcactgtccagatcgtgaccgtcgaaatagccgaatacccccgtataatatccccgggggcactgctcggcatcgcggatcaaccgcagggtcgcgggtttcggagcccccgaaatcgacccggcaggcagcaggctgaaaagcaggtcgcccagttcctgccgccatcccgaccgcaggtcgccggcgatttcagagctcgtctgcaagatttcgcccctcagggtagcgatcttctcgacgtaacggaaacgctcgacacgcacacgatcggcaatccggttcaggtcgttgcgaatcaaatcgacgatggtgtaatgctcgcaacgctccttgtaatcccccagcaaccgggcctcggcatcgggcaacgcagcgtcgatcgttcctttcatcgggtaggagcggatcaccccgtccgtaatgcggacgaaacactcgggagagaagcagaccagacgccccggcagcaacaacttgtaacgggcacggctgcgacggaagatctcctcgagagtaaggttcgttcggatcggagtccgctcggtcaggttggtcagaaaactgtccccgcgaagcaacccccggcgaatgacggcgaaccggcgaagatacgcctcccgatcggtatgcaaaacctccaggcagggcgtaatttccgcctccccggagaagctatccggcacattggtaatctctccgcaggcaaacggaatctgccggcagacgagcggattctccacgaaaaatccctcccgcaattcgaaatcgaccccgaaaaggaacggttttccctgcgcggcacaacgattcacggcttttcggacaagctgagcttccattctgacgatttttattccgcaaaggtataaaaaaggttacttttgtagccgtgaaaaagatactggtaatcgataattacgactcgttcgtccacaacgccgtacaactgcttcgggaatcgtccgaaccggtgaatattacgatacaactcaacgaccggatcgacttcgaaaaattcggcgattacgacggggtactcctatccccgggtcccggaatcccggaagaggccggcgaccttatggcggcgatcggacagatcgtgcggcagcgaatccccgtgctggggatctgtctgggacatcaggcgctcgcccgggcattcggtgccgaactgcgacaactgtcggccccgctgcacggacatccgacgacgctgaccgtaaccgatgcgggcgatctgctgctgcagaaaatcgctccgcccctgatcgtaggacgctaccattcgtgggtcgtcgatccggactcgatgcccgaagagctgatcgcaagttcgcacgatgaaacgggacacatcatgtccttttatcaccggaatctgccgatacacggcgtgcaattccaccccgaatcctgcatttcgaattgcggcccggcgctgatccgcaactggctcgccacctgctgacatccgctgcgggaaaggagcctccggaaattcccggacctttaatcgacctttccgaccggggcggacggggtttcgtcgttcagacaagccgcctcgatccatcctgtcagttccgccccgaacagtcggcgcagatccccttgataacgaaattgatcgtttcggccgaaaatccgtccggcaggcccacctgcggaacagctacccctcgcaggcaaaaggtacgccggcaatgcgtgcaatagaaatgggtatgcaggtcgtcgatttcacaatcgcaatcgctgctgcaaagcgcatatttgagcgaaccggtgccgtcgtcgatgccgtgcaccaggtgatgcgccagaaaaagagtgagcgtacggaaaagagtcgatttatccaccgtatcgagctcctcttcgagatccgcgaggctgaaagcccggtcgaatccggccatcgtacgcagaatcaacagccgcagcgccgtaggacggatatcgcgggccttgaggcgggaaatgtattcgttttcgttcataggtgcaagatacacattaaaaacgacgattggaagccctcacggcattcagaaccgcaagcagagtgacgcctacatcggcgaagaccgcttcccacatggttgcgatgccgagtgcgcccaacgtcagcacgacgaccttcaccccgatcgccagcaggatattctgccgcacgatgcggtgcgtaagacgtccgatacggatcgccgcaggcagacgcgaaggctggtcggactggatcaccacgtcggccgtttcgatggctgcgtcgctgcccaaagcccccatcgccaccccgacatcgctcgttgcgagagccggagcgtcgttgaatccgtcgccgacgaaagccgtgactttgccgggctctccgcgcagcgcttcgagtatctccatcttgccttcgggcaggagatccccccgggcctcggaaacgcccagcgtgcggcccaaattcgccaccagcgcctcccggtcgcccgacaaaatccgaatgtcctcgattccgagcgacttcaattccgccacggtacgcgcggcatcctccttgggcttgtccgcaatcacgagatagcccgcataccggccgtcgagtgcacatacgacgatcgtttcgggaatcgcatcgacctccgacggatattccacgccgaagcgagccatcagacgcgtattgcccaccagcaactgtttcccgtcgaattcggcccgaatgccgtgtccggcgatttcaactgcgccctccgaagcgagaagagcgacaccctccctctcggcatactgcacgactgcccgggccaccgggtgcgtactggtccgttcggccgaagcgacccatccgagcagctccccggaattcacgcccggagcaacatgcacctcccggacttcgaacaaaccttcggtcagcgtgccggtcttgtcgaaaaccacggtattgacccgcgcaatggtatccagatagctgccgcccttaaagagcacaccggccttcgaagcaacgccgataccgctgaaatagcccagcggaatactgataaccagcgcacaaggacaagaggccaccagaaataccaaggcccgggacaaccattcgtcaaacgaataggcgaagcctccgtgcaggagcgaccacaatccgggcaaagcgacgatcagcacggccaatcccgtcactacgggagtataaatccgggcgaaacggcggatgaacaattcggcgggagccttgcgcgccgcagcctcttcgaccatggagagaatccgcgaaagggcgctctccccatacgggcgcgtcacttcgatccggaccggctgcagcgaagagatcatacccgccaacacctcttctcccttacggatcgtccgcggcgtactctctccggtcagcgccgccgtattgaacggggccgcctcggacagcaaaacgccgtccagagggacacgtccccccggaagcacctcgatcgtccggcccggcacgacctgcgcagcgggcatagccaccggtttcccttccaccaaaacgttcgcctgttcgggccggatatcgacgagcgcacgaatattccgccgcgcccgctccacggcacgctcctgcaacgcctctccgatcgaatagaacaacatcacggcaaccccctcgggatactctccgatatagaaagcaccgatggcagcgaggctcatcagcgtatattccgtaaagaaatcccgctgccgcataccgttccatgcctcccggagcacaggaagccctaccggaaaataagccgcgaggtaccagcagaaccgtactgcgggagatgcgaaaaattcgacaccggtatattgcatgacgagtcctgccgcaaacaacacggccgacgcaacgggcctccaatagctttgcgaatgatggtcatggtcaggacctgcattgcaagcggcgcagccgcgaccattcgtttgacttttcataatgcttttattcttctttggtgtcaaatatagtgcattttccttgcaacccggttgcaaatacaccggcttcccgtttcattttctcgtcgcagaaagcttttgcttaccgaaaaatagtatatttgtaggaacaaattaagacctgaagcattgcgtcccctcaaatttcatccgattctgaagcagaccctctggggcggcgaacgcatcatcccctacaaggaactcgcatccgggctctcccgtgtaggcgaaagctgggaactttccggcatgcccggttcggaatcggtggtggcggaagggccgtgggccggaagcaccctgtccgagctgatcggacgcttcggcgcagaacttctgggcaaagccaactatgcccgtttcgggcaggaatttcccttgttggtaaaattcatagatgcccgggaagatctttcgatccaggtacacccggacgacgaactggcacgaaagcgccacgggaaaagcgggaaatgcgagatgtggtacgtgctggaagcggaaccgggcgcttcgttactgaccggattctcccgtccgatcgcaccggcggagtacgaacgtcgcgttgccgacaatacattgaccgacgttttgaatcgccaggcaatcgcatcgggcgacgtcttttatctgccggcaggacgggtgcacagcatcggaaaggggtccttcatcgtcgagatccagcaaagttcggacatcacctaccggatctacgatttcgaccggcgggatgcagcgggcaattcccgggagttgcataccgaattggcacgcgaagcgatcgatttcgaatcttccgaaaacagccgcataacgtacgctccggagaacaatcaggaagtccggcttgtcaccacgccttactttactacgtcgctatataccctgaccgcacgaacacgctgcgactggtcggcaacggactctttcgtggcaatagttctgcttcaggggagtggttcattgaccgacaacgaaggcaatcgaatcgatgtccggcagggcgaaacctggttgttgcccgcatcgacgcaatggaccgaaatcactccgcatacagcgcccctgcgcctactgacaagccggatttagagaaccccgaattcaaatgaagccggcttcaccggatcgagctaacatggttattatcttgcgaaaccatgctcccggcactccacttcctcaccacgacaccgaccaatcaagcgcccaggaaaccgcccgttattcccacagcaggaagacaccaacaattctacgacgaatccgtccctgtctgcgaaaacgatccggacctcatataactccaaccattatcttcggctgaaatatgggatccaaccgcagcgacagaacattcgggatcccgtacccgcgatttcatccgcgaaccaaggtcctcaccgcatgcaagcacagctccgggccttaaagcataacatcggaaacgaacggaagtaatccgttccaccgggtacacgtttccagaccggcatccagttcttgactcacccctcccccggagcacgatccctaccggcaacacgatcggtatcgcagtccttaacccaagcgccgcctccaaggaggccgaatagtcagggaaatccatccgcaggaagcaaaagtgtagtacagacgaattccgccggcaatacaatactctatagatattgataggacagtgcgatactacgacagaggaaacccctgatcccttcgccgcatacgcaaaaacttcgttgtttatcgtttgggactatttcaaccctccaaaaatcgcattcggatctgaactccgtcccatcccgttttgccgattatcgctcctgtatttcccaagtgacattccgctcccgaaccatatcacgaatcacttccgtcccgaagagccggattacttaaaatagcggatcgctctacattgaatttccgaaaaccccgcacaaacgaagagcctatctcgatcatagatccgtcctgcgacatacaaatctcccgcacattcgaaggaattacaatctatacggcctgcatttcttctgcagcggcaaagcaacaatatccggttcattttacaggatttcggtttcgggcgccgttattctcggcatttggctgcgtttataaaccgccccccccactacgaatacgtgctgtaaagcgtatgcccacgccaacctccaggcacaaaatatcaacctctaaaccgacataaccctccttggcaggctctgccgctgagagccaaccgcacgaggggaagggacacgcaagcccgcgaacaaaaagaaagccggacccttgttcaggatccggcttgaagaggcggctacctactctcccacgcgcgtagcgcagtaccatcggcgttagtgagcttaacttctctgttcggaatgggaagaggtggaacctcactgctataaccacctaaaagaacttttgctccaatatatcggaactatgcgaatatatcttttcgatatataatccgtcgcatccggtaaatttgacacgtacaggagatgagataaagattcgaaaaagaaagcctatcgggtaattagtactgctcggctttgacattgctgtctttacacctgcagcctatcaacgtagtagtctcctacgcccctcaagggaagacttatcttggggatggcttcgcgcttagatgctttcagcgcttatccagaccgaacgcggctactcggcagtacacttggcagcataaccgatacaccggaggttcgtccaactcggtcctctcgtactaaagtcaggacccctcaatcttcctacgcccgcaacagatagagaccgaactgtctcacgacgttctgaacccagctcgcgtgccactttaatcggcgaacagccgaacccttgggaccttctccagccccaggatgtgacgagccgacatcgaggtgccaaaccgccgcgtcgatatgagctcttggcggcgatcagcctgttatccccggagtaccttttatcctttgagcgatggccagtccacgcagaaccaccggatcactataccctactttcgtacctggtcgacttgtatgtctcacagtcaagcacccttatgctattgcactccgcgcacggttaccattcgtgctgagggtaccttgggaagcctccgttacgcttttggaggcgaccaccccagtcaaactacccaccaaacggtgtccccttcgcagggttagaactcaaatacacaaagggccgtatttcaacgtcggctccacgaacactggcgtgcccgcttcaaagcctccggcctatcctacacattgtgtacccaaattcagcgttaagctatagtaaaggttcacggggtcttttcgtcccgttgcgggtacccggcatcatcaccgggactacaatttcaccgagctcacggttgagacagtgtccagatcgttacaccattcgtgcaggtcggaacttacccgacaaggaatttcgctaccttaggaccgttatagttacggccgccgtttactggggcttcgattcaatgcttctcttgcgatgacatcccctcttaaccttccagcaccgggcaggtgtcaggccctatacgtcttctttcgaatttgcagagccctgtgtttttgataaacagtcgcctggacctcttcgctgcgccctactttcatagggaccccttttcccgaagttacggggttaatttgcctagttccttaaccgtgattcactcgagcaccttaggatactctcctcgaccacctgtgtcggtttacggtacgggtaacatatactataacttagaagattttctcggaagtcgacttgggtgctctatcaaattgcccgtaggctctctgtactgtcaggtttcagcaaggactaactcttaatctgcccctatacctacgccctttaaccacctattccgtcaggtggcggcacttacgttccttcgtctctccatcgaggtatatgttagtatcggaatattaaccgattatccatcgagatcgccgttcggcttacccttaggacccgactaaccctgatccgattagcgttgatcaggaaaccttggtcttgcggtgtgcgggttactctcccgcattatcgttactcatgcctacatttgcttttccatacgctccacaattcctcacgaaactgcttcgacgctgaatggaatgctcccctaccgcgctctcgcgcccagaacttcggtgatatgcttgatgcccgtttattatccacgctctgtcgctcgactagtgagctgttacgcactctttgaatgaatagctgcttccaagctaacatcctagctgtctctgcaacaaaacatcgttagatcaacttagcatattcttcgggaccttagttgctggtctgagttgttcctcttttgcgactggacattagcacccagtcactcactgctgtaaatcatactactggcattcggagtttgtcaggatttggtaggcggtgaagcccccgcatccaatcagtagctctacctccagtagactctttattacaacgctgccccaaaaggcatttcggggagtacgagctatttcccagcttgattagcctttcacccctaccctcaagtcatcgagaagcttttcaacgcttattcgttcggtcctccagttggttttacccaaccttcaacctgctcaagggtagatcgcaaggtttcgcgtctacaaccactaactaaacgccctgttcagactcgctttcgcttcggctccgtgcatccttgcacttaacctcgctagtgattagtaactcgtaggctcattattcaataggcacgccgtcacagcacgaagctgctccgaccggttgtaagcgtatggtttcaggttctatttcactcccctgttcggggttcttttcacctttccttcacagtactggtccactatcggtctcttgggagtatttagccttaccgggtggtcccggctgattctgacaggattcctcgtgtcccgccatactcaggatactgctatcgcataacaaacttacctgtacgagcctttcactctctatggatggactttccagaccattccagttcattgttaattgaatattgcagtcctacaaccccgatattgccgtaacaatatcggtttgggcttcttccatttcgctcgccgctactttggaaatcgatgtttctttcttttcctcctcctacttagatgtttcagttcagagggttagctcacctcgcggtgtgacaggtcttctacctgccgggttgtcccattcggatatctgcggatcgagtctcgtttgcaaatccccgcagcttttcgcagcttaccacgtccttcttagcctccaagagcctaggcatcccccatacgcccttacttactttctttttccgctatgcataccctattgtatatgcatagcctatatctcatctccttaatcgtgtcaatgaacgatgatcgaatcgcttcaatccgagtggaggataagggagtcgaacccttgaccccctgcttgcaaagcaggtgctctagccaactgagctaatcccccaagcttttgtgtagtcccgtgcggacttgaaccgcagacccctacattatcagtgtagtgctctaaccaactgagctacgggactatatcgcgggaaactccactctataaaaaaatcaccggtattcgagagaaaagaacgcagatcaatctgtcgttaagtaatcatactctccagaaaggaggtgttccagccgcaccttccggtacggctaccttgttacgacttagccccagtcaccagttttgccctaggtcgctccttgcggtcacgaacttcaggcacccccggctcccatggcttgacgggcggtgtgtacaaggcccgggaacgtattcaccgcgccatggctgatgcgcgattactagcgaatccaacttcatggaggcgggtttcagcctccaatccgaactgagataggctttcgagattcgcatcccatcgctgggtagctgccctctgtacctaccattgtaacacgtgtgtagccccggacgtaagggccgtgctgatttgacgtcatccccaccttcctctcggcttacaccggcagtcccgccagagtgcccagcttgacctgatggcaactaacggtaggggttgcgctcgttatgggacttaacccgacacctcacggcacgagctgacgacaaccatgcagcacctagtttcgcgccccgaagggaaatcctctttcaagaatcgtcgctaactttcaagcccgggtaaggttcctcgcgtatcatcgaattaaaccacatgttcctccgcttgtgcgggcccccgtcaattcctttgagtttcattcttgcgaacgtactccccaggtggataacttatcgctttcgcttagtcaccgactgtgtatcgccgacaacgagttatcatcgtttactgcgtggactaccagggtatctaatcctgtttgctccccacgctttcgtgcctcaacgtcagatatagtttggtaagctgccttcgcaatcggtgttctgtatgatctctaagcatttcaccgctacaccatacattccgcctaccgcaactactctctagctcaacagtattagaggcacgttcagggttgagccccgaaatttcacctctaacttatcaaaccgcctacgcaccctttaaacccaataaatccggataacgcttgaatcctccgtattaccgcggctgctggcacggagttagccgatccttattcgtacgatactttcagacagatacacgtatctgcgtttaccctcgtacaaaagcagtttacaactcatagagccgtcatcctgcacgcggcatggctggttcagacttgcgtccattgaccaatattcctcactgctgcctcccgtaggagtctggtccgtgtctcagtaccagtgtggggggttaacctctcagtccccctatgtatcgtcgccttggtgagccgttaccccaccaactagctaatacaacgcatgcccatctctaaccatcggaattttcaaccataaaagatgccttctatgatattatggggtattagtaccaatttctcagtgttatccccctgttaaaggtaggttgcatacgcgttacgcacccgtgcgccggtcgccaccatagatattgctatccattatgctgcccctcgacttgcatgtgttaagcctgccgctagcgttcatcctgagccaggatcaaactctccattgtataaagaataatgttttgttagagtcctgactacttaatttccttaaaggaatttgacagataaatactacatttctttttctctcaatattaccagtaattcaaagaaccaatctcaaaagagccgtgatttttttcatcacgtttcggactgcaaagatatgtaatctttttcaatccaccaaatcttttttcaagaacttttgcattttcttttttgctccgtcatccgaaaaccggattcgacttttaatcgagcaactgtttttctcaaatgcggatgcaaaggtagggattattttggaatctgcaaatgttttgatgatttttatatcgaaaaatgtatttttttctctttttatattcaatacctatttatatataaattaaaactctgctcgtgataataacaaaaaagcaagtatatattcagcacacctctttggtgacggaacgccccacttccgaagaaaagatttaaggagtgaggccgaattacagacacgaccacagaccgcgaatcagcgaccgtcggaaacaatacattgaaatatttaattattaatatggcgcaaccgttttcttgtcgatttcagcggcagccacactcctggaggctattcggttcagcctatcccttccttcaaggataggcttccagggaaaatcaaagcatatcgatcggttcagggcgaacaggccggcgtattgatataatcaaacaaaaaaacggagcgaccatacagtcgctccgccatttttcaatcaacgagaagcttacagccaaccgccgttcgaagccgccttcgcacggcaaatgatcgcaacttcgcggctcatcgacgttccaccgacagagctcttaaccgtcacaagaccggcgctctgctttgagcaagtaatcgtagcattgttaccctcgacagtgaacgtaagccccaacttatccttcaccgcatcgctcacctccagcatacaagaaagtgcagtaacatccccgtaatatttcgacagcgaaatcgtcgtcggcttgtcctgctcgaccgtgatcgccggagtaccccgtacagccatcagcatcttgtaggcgtcgatcatacccgaacccattttccccttatactcgaccagattcatcgtaccgttgttatgtttcttgacaccggtcagatacggatccaaatcgttcaccgaagccagcaacatgctgcggaactcatccggttcaaacgtcttgcccagcttcttggcataggaaagggccaaggccgcgacaccggaaacatgcgggcaggacatcgacgtgccggacatgtaggcatacataccatccaatttcagaaccgtcgaaagaacctgaccggcatcactgagatttttgtgataatacagatcaccgcccggcgcagcaatatctgccggcatcccgtaattcgtaaagaccgaaggcgtaaaatccgtactgagcgaagtcacacaaaccaccgaaggatatgccgcaggataaccacaggctcctgcttcattaccagccgcaaaaatgataataccgccgttgagcggactacccggacgtttcgtattaataaaatgggcgaacgcattggcttcaatacttctttcgtccaaatactgttcatccgaattgatcgcaccactcatcaacccccaactgcactgcaggatagaagcccccatactggttgcataatagatcgcatcaacattccggcttatcgtactctgataccgtccggcaaaaatttgaatagacataatcttcaccccgtcgttgtttccgctgccgcccgcgataccgcagacgccgataccattgttgttcacggcagagatcgtccccgccacatgcgttccatgaccgctatccttgggatccgtccacgttatatccccttggtctttggcaaaattatagccatagacgtcatcgacatatccgttaccgtcgtcatccactcccttctgaccgttcaattccgcctgattgacccacatattggctgcaaggtcctcatgcttatacattaccccctcatccatgacggcgacgatgatcgaaggatcgcccgtacaaaattcccatgcgggttcgacattgatatcgcatccctccttaataggactcaccagcgtttcatctcccgtattcttataatgccactgcttattcaacatcggatcgttgaatttgggagtttctccgctacgcgtattaatttggtcccgatccgaactccatacattattataaggtacagccgacatttccgtaaaattccgggcaacatatccgtcatattgaacaacctctacatcttcgacagcggccaatttgcgagctgcttcgtccagcgacacctgatcgttgaacctcacccgataccaacggtgcaaccccgaagcccgagcgtcggcctcatgttgctcaaccacagggattacccgctcaacggatacggcactaatttctttcagagccgcatcaaaaggttgaatacccgtacgcgtagattcggaacgcgtcactcccgcctcgacagcagcgatcgactccttcgaaaatttcacaagtaactcacccgcctccgcttccgccgaggtaagaattttacgacttccggcgctcatgtccggcgcattctccatttcggtcggatcatttacacatccacctaaagcggccgcaacgaaaattgcgacaagagtccaataaacttttttcataaccattaaattaatacattcaacaatcctgctctcagaacccgccatccattttccacttcatttcgaataggatttcaaaaatatcccgaatggattttcacacggcagatactataagatggcaaattcagccattaaaggtaagtatttttttaggaaatacgaataatcgaaacccgcaaactatcttttttgtcaagaaccgatttttttaagtaaatttgcccctatccaaaacaagcgtcatgaacggaaaaaaactcacactccttgtcattctgctgctgatcctcgatcaggccctcaagatatgggtgaaaacccacatgactctgggagaggccatcatactcatcccggactggtttcagctctacttcatcgaaaacaaaggtgcggccttcggcatgcacatcgccacgccgggaacgatggactggggcaagctgcttttaggtcttttccggatcggcatggtcgtcgcactgatctggctgattcgccatttcatgcgcaaaaaagcgcccaaaggagtgttgatcggattcgggctgattctggccggagcgatcggcaacatcatcgacagcgccttttacgggctgatcttctcggcctccacacccgacacggtcgcccatttcggaggccactacgcaggattcatgatgggcaaagtcgtggatatgttctactttccgctctttcagtggaacagcgttcccggattcctcgatttcctggtcgatagccgcaactacttcttcggtgcagttttcaacctggccgatgcttatatctcggtagccgtggtttatctgctgatttttcactataaatacttcaacaagtagtttttttcgaaaaaatcgccccaaaatatttgcatttaagaaaaaagtattacttttgcacaccgtaattccatgatgcccaggtggcggaattggtagacgcgcacgtttcaggtgcgtgtgtcgagaggcgtgcaggttcgactcctgtcctgggcaccagaaccccgtcagagtttcctctgacggggttttgctttttccatacaaggcgtcatccctgacgaacgcaatactccgacacaccccttcgcactgtccgacgacgctcctcttttccggatgacaaaattttcccattgggtccgtacgcatttcttctccgatcgcgttctataaatgcgacagaaaaacagtatctttgtttcatgctccaagaatttctgcaatacttagcgacggtccgccgcttttccccattgacggtgcagaattaccgccgtgacgtgacaaacttccttgagtggctcgatgttccggaagcggatttcgatccccggcgaatcaccgtggaagacgtccgcgaatggatcgtgcaccgtacggaaacaaaacatctgggagccgcctcgatgaaccgggagctctcctccctgcggagtttcttccgttacctccaccgtacggggcgaatcgacaaagaggtcatgtaccgcatccacgcactgaaaacctcccggcgaatcccggcattcgttccctcgacacgcatggaggggattctcgacgaactggaccgggagagcgaaagtccggaattcaaatttgtccgaaattcgctcatcgttctcctgttttacagttgcggactgcggcttgcggaactcgtaggtatcgaccgcgacgatttctcgggcgactataccgcactcaaagtccgtggcaagggcgataaagagcgtatcgtcccgatcctgccgcccgtccgggaaaaaattttgcactatttggacgaaattgaccggcagggaatttgcatttctaaagaaaaagcactatttttaaatcagcaaggaaaacgaatctcccgcagcaccgtctatcggaccgtacagagccaattgcgacagggcggcgttcagggcaaaaagagtccgcacgtactccggcacaccttcgccaccgaattgctcaacaacggcgccgacatgagggcgatacaagaattgctcggacatgcgtccctgcaggcgacgcaggtctatacgcacaacagcatcgccaagttgcaggagatctattccaaagctcacccgcgcgagaaaaacggagcggagcaaacaaaacaacagaattgatcggccggagcacagttccgcagataacgaaccttataaaacatagtattatgaacgtacaaattcaatccgtaaaattcgacgccgacaggaagttggtcgaattcgtagagcacaaaatggacaaactcgaccgttttgtcgaacgggctatcggagccgacgtcatattgaaactggataaagaccacgaactcggaaataaagtcgccacgatcaacctccatattccgggagacgacctggtggccgagagccggggcaaaagtttcgaggaggcggtcgatctctcgatcgaagcgctcaaacgccagatcgacaagtacaagggccggctcgaaaaatagaataatgttatggtaatgcatagcggcgaccttaaaaggtcgccgctatgcatttattcacctcattttatccgtaaaattccatcgtattatatcaatcgagaaaattcagcaatgcaaatgacgcgacaagcggccaaaacagaaaagccaacacaattccaacgagcaataaaaacaccgcttctccgaaactaaataccccacaaagggttaaaataacgagaacgataaaataaccgataaaattaaacaaaacggctcctactaccaaagaaacataaccgaaaaaagaagagagacatccagtggtttcccgggtcgattcgggtttcctctgatccgtcggaataacctttatcaccgtttcctgttggagaggccttatcaagtaaatcgaatgtccgcatcggggacatgtcggagcataacgcgacacctccaatccgcaagcaggacaatggatcaacaacgactcttcggaattatcttttacctccggaaataaagtcaaatcaaccgccgacgcacattcatcgtttgacaaggattcctttcgcatattatcctttttcttcttcaagtgcctccgccatacaagtaacacaactattcccgcaagtgttaacccaagtaaaatttccacaaaagcatccatcgtattaaacacttttagcaatttaattagaagcctgcttcaagcctaaaacacccactatttcactaaaatcactccttcttccgccactcctgcacttcattctcccgtccgaacggattacgagtcatcaaccgtcgtgtcttctttatgtcgagtttctcctgattctcggacaaatacgctccgatttgggaatgaacccgatgaaatacacgcgaccgatcgtttttataggccgcaaataataactcgacatagataatttcatgtttatcggcaaatgcctcgataaaattgcgggtcgtaaaaatttcacccgccatctccgcaatcacctctccggcatacttggtcattacttcataaaccgattgtccgtttttctgttccatagttttttttcctgttacaatccaaataaaattggatcaaagttttcggttaaatttgtttttatcttatttacagcgtattgcatttcttggtgaacttctcggccaaaggtcaaggcacgagagcctccgccggcctttgatcgagccggtgcggaggcacatcgtgcttaacacctttggctctctcgaaagccgagatttcagaacccgaaaaaatccttcgataaacagattttccttagcggtcagctctctgccgcatatcccttattagtttacaaaggccagaggagcagattattttaagcggacgttaacgccgcaacaactatgtagtattctctctgggaaaatccgtttaccggaagggtttctctatgacacgatactattgacatattcggtctgatgtttcagcacaaagaatagacggtttaccagtttgcgggcgacctttacgatagctttgctcttgggcatccgtttgcattgttccgtatagaacaggttcatcgcagggtcttgacgtaccgccacccatgccgcttctatcaggttacagcgcataacggcgtgttttcgtatggtaatatcccccgtcccatctttctctccgctggagtggcacatcgggatcattccgatataggcagccagttgttcggcattgcggaagcgggttatgtcgcatatctcggagaggaacgccattcccgtagcctgcccgaaccccggaacgctcataatcaaccgcagcggttcgcggaatcgatccgtcttggccaatgtccgtaaagcccgtgtcatctccagtttctgacggcgtaactcttccagatgccggatatgaatgtcgagggcctgacggccgctcggggtgagcgtctctatctccttcaaccaggcgaaaaagcgcttcgaccagttggaaaacggagtgagaaactcctgcggaatctcgatgcctaaataccgaagttgagacttgagccgattcttctgacgggtcgtgtctttggttatcgagttcttcaatcttatcaaggaacgcatctccaacgatacgctgtccggcgtataaatgcctttcagctcgttggctcttaaactccgcgccagcttaccgctgtccacggtgtcggtcttacgcagcttttcgctgctcttggtcggcacgtcggccggattgaccacgatgttgtcgatccctaaggccgtcagacgctcgtgtatccaaaatccgcagaagcccgcttcgtacaccgagtgatactcggcgcccggataactccgagttaaaaatccgtacaacgcttctgggctcggatgctggctaaacttcttcaatacggaggtttcggacaagaccgtaaccgaccaactcttcaaatggacgtcgattcctacataaatcttttgtcctctgaaactaattttgtttctttgctctctcatggctatcgtcgttttagttagtaaaggttttgcagctttaatctaaccaaaatctcgatagctttttcatttatccgctatcatcgcggcttaccctgattgtaaacatagggattattttcgagttaaaaattataatcgtaaagcagctcgaaatcatccaggcaaaggattctggagcctgcatcacaggtaattatcaggtgagtcggcttccggtctgttcgcaaatactccagaggaatcgtaaattgctgccaatcgacatcctcagccacttgcaattcaccgtaagcaatcaaatcggaacaggatggatccaaggcctcttcaagatattgatcaacaacaggatgctccgggattttaacgtcatgatctggtaccggagaccatgttcccaatgcgatcctaattgtcgcctcctgctccttcgtatctgtactcatcacgttcctgcattgcaaccacccccgcaaagcagtcggtgtcgcttcgaaaagctgtccgtaaatattccaaagcattgaaagcaccccaataacaccactaccagcagcaggatctacatttatcccagtaaaaatatgccctccatataaatcttttactatactatcccactcttctttctggagtttcacggcatatttcccagaactcccggggcgaatcgtcggttggggcaatcccatctctgggtaacccctcacgattgaagttgcccaaaacgccccctcctccgagaaattccactcttcaaagtcgccgttcgggagtttcaatgcgggcagcgtagtcacgatatgaatccgactctcctcatctcgccagcaggccattatctcgtaggtcgtctctggttcggcttctacgtgtgcagaaaaaccgttgctcgaacccgctccggcaacttccacccactctttatcaccttgtttccgataacggaagcccgcctgcgcaacatcggatgcacacgagccggacaaccaaatcacctgggtccagacatcggcacgttcgagtctgacgttgacagagcccgaagtagcctgtgtaaaacagatactgtccagtaaattcccctcggaatccaccagtctaaccgtagcctggcggcttttcacatcggaattggggcggaaagagaatacgagcgactcttctcgctgatcggtacgggaggtctccactctgatccacgtccgatctttctcagcaatctcaaccgtgtaatcgatgttcgtaataagcgttacttgcaaagaggtgccttcagcctcgataaggtaggagttggcggaaagatcaaaaacaacatccgatttcgccttgacctctaaatcgatataacggcttactgtctcgttcccttcatcggagaggattacgacaatccgctcgtccgtcgcagtatcgggcagatagataacgattttccccgaccagtgattcgtttcgatgacatcaacccaatagccgtccggagcgacaaccctcactcgtgcattttcactcgccccttccaacgtatatccaacctcacaggtttcaccggcaacaacctgcagcggcattgaacagtcgaatacaatattcaaattccccgaccctccatccggtccatcaccactacaccccgccaaccatagacaggcggccaataaagcaagcatttttttcataattataaaagtctgttgccacccggctccgacatggcgggttataattaggggataaaaaagaaagtgtggagccgttcgtttatctgataagaggttctgacaaaacccaagacgaataaaccaacacaataccccacacctgctcagtatggggtgattggaataatgtacacataccgaaacagatgatgagtgttgtcgttatcctcgtcttgcttgaaactgtcagatttcttatcaaggataaaagcgaaacactttcatcaaaatatgtctgtcggacgaaaccgacaccacaaaactataaaatattttgttccggacaacactcgagggggtattgtcctgcaaatttccaaaaacagcccgttataaatacgattgcggaaaaaagagtatttttgtgcactgaaaccgacgtttccaatgcgttacacgaacaagaaaatcctgaaaatcaccttcccggtgctggtctgcctgctgatggagcagttgatcggactgacagatacggcctatctgggacgcgtcggagaagcggagctgggggcttcggccctggcgggtatcttctacctgatgatcttcatgctgggcttcgggttcagcatcggcgcccagattctcatcgcccgccgcaacggagccaaggagtattcgcaaatcgggcctctgttcatgcagagcacggcgtttctgctgctgatggccctcgtgctgttcatcctctcgaaagtcttcgtagcccgcatcatgggtaccctgatcgaagctcccgatgtacgggaagccgccgtccggtacctcgactaccgggtttacggtttcttcttcgcctacgtcgggtcgatgttccgggcattctatgtcggcacgacccgcacacgcatcctgacgatcaactcgattgtcatggtactcaccaatgtcgtattgaactacctgctgatcttcggaaaattcggattccccgaaatgggcatcgccggcgctgcaatcgcctcttctatttcggaaggcgtatccgccctcttctacatactctacacccgctatcggaccgactggcgccgctataaattccgattcacgggattcgacttttccctgctgaaacaaatcctgagcctttcggtctgggtgatgatccaacagggcgtggctttcctcgcgtggttcctcttcttcctctgcatcgaacacctgggcaagcgcgacttggccgccacgaacatcgtgcgggccgtatcgtcgctgatcttcatgttcatcaacgccttcgcctcgacagccagctccctggtaagcaacctgctcggcgcaggctatgccgaacagatcatgcccctctgccggaagatgatccgcctctgtttctgcttcgtccttccgctttgcatcctggcggccgcgattccttattggacgctccgcatctatacggacgacgtatctctgatcgaatacgccatcccttcgctctgggtgatgctgacgaccaacattccctgcacggccgccttcgtctatcagttcagcgtatcgggtacgggcaacacccgcacggccctcacgatcgtcgcctgcaccagcatcgtctatgtcgcttatacggcgctgctggtttacggactgcatgccgacgtcgcactttgctggaccgccgaccatgtctattacggctgcaccctcacggcttcctatctttatatgcgttacggcaactggcgtgcccgcaagatctgacaccggacaacaccgcttcataaaaaatacctctcccaccggggaagaggcataaaaaaagagtatcctttggggatactcccgtaagttccgaaaagggaaattacttggcagcttcagcaggagccggagtctctgccggagtctcgcaggccgttgcgcagctatcggctttctcgcaagcggcagcctcctcgcagcaagcaggagtctctacgacctcggtagcctcaacttcaacggtttcagcctgttttgcctgtttgccggcgcagcttaccatggcagcggcagcaacgacaatcatcagagataaaactttcttcatagttttaattattaaaggtttttaacgcggcaaatatatagattcgggtagaatctatcaaatttttttcgttatttttaatcttttggaaaattaacgaatcaggtcggccaccgtgagatcttcacgcattagataagcctccggaaactggctgcgaatcttgcccagcaacacgatcgcctcctcggaagtgacgcaatttccggcagaaaccttgaaatagggattttcataaaccagatagaccggaatatccgggaatgcggtttcgaacgtctgcttggcggcaagcgcattggcccgggcctccgctccgttatcgaagaaaataccgattcgataccctttgaaccggatgcggtcgttgctctggctctcccggctcacgacgcccgcagcatccccgtgctccactacggtaacggctgccgaacccgcaggctgcgacagacgctccttgaaagaggcgagcgactgggccgaaacgccaccatacaatccgaaaacaaacagcaatgaaacgattatcctatacatagtcactattttcttaaaccagtcggaacttcccggatacactattcgaacggaaactcctcccggacaaagatagtgaaaggtgagagcaatcgtgcgggcttgcacgcaaagattgctgaaccgaatcctatcttctgcaaagatagtgaaagccgagaagaaaacggcaggaacctgctcccagtttcccgaagcgtatctcctatcttcggtaaaaataaggaaaggcacacggcaagccgaacctaacgttctgttttcctcctccttgcatggcagagtttgcaagtgttcttgacgcatgcttcgagcgtcggtcgcttgagcttatccgaggcgcatcctatcttctgcaaagatattcaaaaattcggaaaaaggcatcctttcgaaagaaacacggcgccgcacggcccccgcccgcagcgtcatccgcacttcgacctccagccgggcgtaatccccctcctccaatcgcttccgaaggaccattccggcggcggcatcgggaaaatcgaatttccagcgactgcacaccgggccgcgactccgcccgggaacttcgacagaacccctcaacacggcacgtcccagcgaacccgctccggtgaaaaattccaattcagcctcctcgagccgcagcgtgcggcgggacgcattttccacgtcaaacgtcaaatccagacccaccgtaccgtactgacgcaccgccacctcttctccgatccggacctttcgggccagggacgcgccgcatccgctcaagagtgcggcgaacaacaccggcaatacgtatttcaacaaggttctcacgcgaaggtcctatttttctcccgtatatatctgcgcgattcccaaactctgggaacgggccctgcaatccttgaatcccgcctcgcgcatcatcgccataaaacattccggagccggaaattcatccaccgaagcaggcaggtactcgtatgccttgcggtctttggagatcatcccgccgatagcgggcaacaggcgatggctgtaaagaccgtacacccttcggaacaacggattgcgaggggtcgaaaactccaggataacgaccttcccgccgggcttcagcacccgggcgatctcccggagccccgctccgagatccccgaaattacgcactccgaaagccaccgtcaccacgtccaccgacgcatccgccacctccaggcgctccgcatccccgagcgaaagcaccacccgttcgtccagtccgcaggccgtcgccttccggcgggcctccgcaagcatattttccgaaagatcgacgcccaatacctgcacgccccgcatgcggcgggccatcgccagcgccaggtcgcccgtaccggtcgccacgtcgagaatccgccggggctgcatccgccgcacgatccgcaccacatgccgacgccacaatttatcgatctgaaacgaaagcgtgtggttcaaccggtcgtacgccggagcgatgcggtcgaacatctcgcgcacctgttctttcttgtcctgctctgtatcgtatggtttcatcttttatgtactttatgaatcgtaacggatcgcctccaccggtttgacctgtgaaatgatcgaagccggaagcatcagcaacgtcaaaatcacgaccacgactcccgcattgagcgccaaccaccaccccacgccgaacgcaacgggcacctccgacagcatataaccctcgggatcgagcgggatcaggtggaaataatattgcaacagacagattcccaaaccgatcgcattgccccacacgacccctcgcaagatgagcatcaaggcccggtagagaaaaatccggcgcagcgacgcattgttcattcccatcgtcttcaacagaccgatcatacgtgtacgctccagcacgagcgtcagcaacgcggtcgccatgttgaatacggccacgacgaccatgatgaccaggatcaccgcagcattgacatcgtgcgtcttgagccagtcgaacacggtcgggaaccgctcctgcgcactgcgggccgtcaggtcccaaaaagcctcccgatccgaatccagcaacatatcgttcagccggcgggagaaatcttccgcctgcaagaaatccgcgagcgtcacttcgtagcccgacacctcctcggacgaccagtcggccaaccgctgcacgtttctcaaatcggtcatcgccacgctccggtcgaattcgtccatcccggtcgcatagatacccgacaccttgaaccggtcgcggcgcggactcttctccgactcgacgaaaagcatctcgaccttatcgccgggcgcaagccccatctcccgggcaacgctccgggagatcaaaatctccttggtacgaatcgaatccccgacacggggcaactcgccctcgagcagatggtcccgaaaaaacgaccattcgtaaccgccgtccacccccttgagcatcacgccgagaatcgcatcgggcgtcttgaccacgccccccttcacggcatagggagtgagccgtacgacctcgcctgccgagcggatcgttctctcgagctgttcgctgcgcaataccggcaccgactcgatcgacccggcgcttcgcagatcggcgacctcgacctgggccgagaagccggtgacacgatccgtgatttcccgcttgaaacccatgataacggccaaagccagaatcatcaccgtcacgctcaacgccaccgcgaccacggcgatacgaaccatcacacccggacggttgccggatccgttatgcgcgattctgcgcgctatgaacagttcgagattcaccctcttccgattttgcacgtatttttcatgcaaagtaacataaatttttcttacttttgttcgataaaccgaccattatgaaaaaacaagctttaattacaggggccacttcgggcatcggacacgctacggcgctacggctcgcagccctcggatacgacatcatcgccacggggcgccgcgccgaacggctggcagcgctcaaatccgccatcgaagcgcagggcggcagttgccgcacgctctgcttcgacgtacgcagcgaagccgaatgcaggaaacacctcgaaccgctcgatcgggtcgatctgctgctcaacaacgccgggctggccgccggactcgaacacatcgaccaaggctccacggccgactgggacgccatgatcgacacgaacgtcaagggactgctctacgtcacccgcatcatcacacccaaaatgatcgccgcaggcgggggacacgtaatcaacatcggatcgatcgccggaaccgagccttacgaaaacggcgccgtatattgcgcgtcgaaacacgccgtacacgccatttcgcaagccatgcgtgccgacctgctgagccaccgcatcaaggtcacggagatccgtccgggcatggtcgaaaccgaattttcgctggtgcgtttccacggcgatcaagagcgagccgacaagacctataccggcgtcgaacctttgaccggcgcggatattgcggaaacgatcgcctggatcgtacaattaccggcccacatgaacgttaatgatatagtactgatgccggctcaacaggccggtgcatactacacctgccggaatacgaaataacaaccctgtccgtcttcgaaatccggggccgaatatgtccggaagaatcgaagcgcagacactgaaattgaaaaattatgctgctgattttcaacctgctccaaagcggttattacaccacggagcccgtagcgtcgcggtacgacgccgccacgatgggcatgttcgtgctgattatcgtgatcggcgtaatcggctacatcgtgcaggcccgcctgcaacacgtcttcaaaaaatactccgaagtgcctttccccggcggactcaccggtgcggaagtcgccgaaaagatgttgcgcgacaacaagatccacaatgtgaagatcacccacgtcagcggacaactgaccgaccacttcaatccgcagacgatgaccgtcaatttgagcgacgcggtctattcgagccgcagcgtcgcggcggcagccgtcgcctgccacgaatgcgggcacgccatccagcatgcacagggctacgctccgctggcgttgcgttcgcagctggtacccatcgtgcagttctcctcgcgtatggcaatgttcgtcatcatcatcggcctggtgatcctggcctccacgcagaatgaactgctctgctggatcggcgtgggcatgatcggcgtatcggctctcttctcgatcatcaccctgccggtggaatacaacgcttcgcagcgggccctcgcctggctccagagcagccacacgctcgaaggcgcacagctcggacaagccaaggaagctctctcgtgggctgcccgcacctacctggtagcggccttgagtgccgtagcgtcgctgctctattacgttttgatgattttaggacgccgtgattgatggccccggaaaaggactacacacaccggagctggatcgccgtcaccctgctcatcgccgttctcatcggattgagcctgataccgccgcaaacgctcggcggggtcagtctgcgcagggctaacatcctgtccgacctcatctctttcgaagaagacctcgaaaaagccgaaaaagcgatcgatctggacgatgcggatttccacatcgacctgacgcaggtcgcccgccagatcgccgatacggtgcctcaacacgccccgaccacctacgaatggaacctccgggaagaggcggacgatacgaccgcccatccccggcttccggattcggtccggctgtcgccgacgctgatcccgatcgaagatttcgacacgacgggacacagccgcctcacggccttctatgaaaaactgcagaaaggcgacgctcctgtccgtatcgcggtcatgggcgactcgttcgtcgaaggcgacatcctctcctcggacctgcgtgaaaagctgcagctccggttcggcggttccggggccgggttcgctccgatggcttcgccgctgaccggtttccggcgcacgatcaaaacccagtccaaaggttgggactcctacaacatcatgcaacggcggaacacccccgccgccatcagcgactattattacatctcgggctggctctgccaaccttcggacggagcctccgttcgctgggaaggttcatcggaccgggcttgcctggacagttgccgcacggcccggatcctgttcgtcagccgtgacgacagccgtatcgaagtgaccgtcaatgatcgggacaaccgtacgttcgacatcgaaggttcgcccgccgtgcgacagatcgtcgtccatgacgacatccgttcgttgagtttcaaggtgctgtcgggtgccgcagaaacgatcggctacggtgcaatcttcgaatcggcgcccggcgtggtggtggacaactattcgatccgcagcaacaacggacaggcgatgttctggacctcgcccacggtcaatgcccagatcaatgaaatgctcggctacgacctggtgatcctgcaatacggcctcaacatcctggaaccgggcatccgctccttcgccaaatacggcgaacagatcgagaagatgatcgcctacatccggcagtgcttccctacggccgccgtattagtgatgagcgtcagcgaccgcagcgtgaagtcggactcgggattcgtcccgatggattcggcaccctacatggctgcggcccaacgacaggccgcgcaaaacagcggggcagccttctggagcgcctacgacgccatgcaatcgctcggcggcatggcgcaattcgtggccaacggctgggccggaaaggactacacccacatcaatttcgcgggcggtcgtcgcgtagcctgggctctgtacgacgccatcaaccgaggtgccgaacaacatcctcccttcacgcccgttgcgcatgacaacgtcatcgacacccggaaaatctcgcacctggaaatgatgctgcgccaggcagccaggccccgtatgcaaaaaccctaacgcccggacatgatccagacggtggaaaatatcggggaaaagctggtttcgatgctcacgtacgacgcatcgcagccgttgatcttcagcagcgggctgttccttttcctcttcgcaggattcctcttcttctacggattcacccgccgggctccgatggcccgcatcgtctatgtcatcctcttttcgctctacttctattacaagtcgagcggcatctacttcctgctgctcgtcttcgcttcggtgagcgactactggatcgcccatgccatctacaaagtgcggacgcaacgggcgaaatactggctcgtgggattgagcgtattggtcaatctgggcatgttgggctatttcaagtacacgaatttcctgatcgaaatcgccaacaacctcttcggacaagggttcctcaacttccagaacatcttcctgccggtcggtatttcgttcttcgtgttccagtcgatgagctatacgatcgacatctgccggggacaactcaaacccctgaacaactgggccgattacctgttctatctctcgttcttcccgcaactggtagccggcccgatcgtccgggccaaagacttcattccccagatccgacaaaacccgctgcgggtcacgcgcgaaatgttcggcatgggcgtattcctgatcctcatcggcttattcaaaaaagccgtcatttcggactatatctcactcaacttcgtcgatcgtatcttcgacgagccgctgctctactccgggttcgaatgcctgatgggaatctacggctacgccctgcaaatctattgtgacttctcgggttactcggatatggccatcggcatcgccctgctgctgggcttccgctttccgaagaacttcgacgccccctacaagtcggccacgatcaccgaattctggcgccggtggcacatctcgctctccacgtggctgcgcgattacctctatatctcgctgggcggcaaccgcaaggggcgtatccgcacctatttcaacctgctcgtcaccatgctgctcggcggtctgtggcacggggcggccgtgcgcttcatcctctggggagcgctgcacggcatagcgctggccctgcacaagctctggctgagcgtcgttcccggctccaaagccacaggagccgaaatgcggtggttctggcgtattccgggcattttcttcaccttcaatctggtctgcttcggatggctgatgttccgtgccgaatcgatgaaaaccgtgcagctgatgctccaccaaattttcacgaacttcaatccttcggtcatcccccaggtgctcgaaggttatgccggcatcttcctgctcgtcggcatcggctacctgctgcacatgcttcccgaccgctgcgaccgctgggcgcaacgattcgtcacctccctgccgacggtcgtacaggttctcctggccgcgtgcgtcatctggctggtgatgcaggtcaagtcgagcgatatccagcctttcatctacttccaattctaaacgacctatgcactcctgcgacgaatccctgtttctggctctcaatttcgacggcggtccctgcctggaccggatcatgaccctcatctcgggcatggcgatctggattcccttttacctgctgatactctggctggtctgccggcgctacggatggcgcaacacgctgcttttcctcgcggcgctggctctcgccctggtgctctcggacatgctctgcggcatcttcaagcactcgggtcccctgaaacacctttgggccgattttcctccccgctggcgcccgatgttctctccggccctcgaaggactcgacattccggccgactcgctcttcgcctggcggcatgccgggctccccacaccgaacagcctcgtacacgttcccgccggagccgtcgccgggaaatacggcaccgtatcctcccacgccgcgacgatcgcggcagtcgtcgtaatgtcggccgccgtcatccgccgccgctggttcacatggctcgggatcgccgcagcgctgctgatctgctactcgcgcatctacctggccaaacacttccccgtcgatctgttgctcggcaccggcgtaggcatcctgacgggtcttttcatgctctggctctataaaaaatcgggaagaggctttttcaagcccctcgatccgagcgggaagcaacaggctgaatagctcccgacaaaccgacaccgctgatccggccgctccggtcggcaccccgaaagacacagcgccctgccacctctccgatggcagggcgtttccggttcttcgttcgaaatcagccccggctccttttcaataacggcaccaatcgcaccaagcaaaagagcgccgccaacaatgcgatcgcacccccggcataaccgatccgggcaatcgaagcgtgcgtacagacgaatcctcctacgagtgccccggcaccgattccgacgttgtaaatccccgaatagacggacatggcgatcgccgtcgcctcgggagccagacgaatgatctccgactggaaaaccaagttgaaaatcgtaatggccaacccccagcagatacacagggcgacaaccgggaagtgcccgaaagccgaaaggcgcagcaacagcaggaaaaacgcaatacccacgacggcaaaccgcatgaaggcgtagggacgtttttcataatcgcgcgaaaaccataggcttccgacgatccccaccaatccgaacgccgtcagcacccaagttatccagtcgttgtccagcccggccacctgtgccaggaacggttcgatgtaactgtaccccgtatagtggcccgttaccatgagaacggtcagcacatagacgcccacgagggcggggtttcccagcagggaaggcaccttgcgcagcgaaatggtgtcgcggctcgggacccggggaaagatcgccgccagaaacagccaaacggccgccgcgaccgcagcaatgaagaagaaggtcgtccgccaccccacgtaaagtccgatcacgcggcccagcggcagaccgacgatcatggcgatcgacgttcccgtgataatcaatcccaatgcggccgattgcgcccccttcggtgcgacgcgaaccgccagcggcgaaacgatcgaccagaacaccgcatgcgcacaagccacaccgatccgcgaagccatcagcatcgcataggaagacgaaagtcccgacaacacgtggctcgcaatgaaaagtcccagcaccccgagcatcagccgccgacactccatcctcgctaccgcgagcatcaacggcagcgaaaccagcgccacgacccaggcatagaccgtaatcaacaatccggcccgagcctcggtaatcccgaaatcggccgcgatgtcgctcaacaggccgatgggaataaactccgacgtattgaacacgaaagtacaacacatcagcacgataaccggcagccactcccgcagggcgatacggccgcgggtccatccgtttctcttcagcatagtcaattactcaaagcagtcaatactgaaaaataccgggtgtcgcccgggcaaagccccgccgctcacggatcctgtctgcgggttcgtcccggccgcagcaacagacggccacaaacgcatatcggatcgctccggagcaaaactgcgccaccctgttcggacagaatccgatccgccccccgcaaaggagattcaggaaccgtccgatgcggatagtacatccggcgcatactttttcagcggggcaaaaataaccgatattttgccgttttgtccgtcccgtcccgattttctcgtccggcaggttccgaaacttccgggtttcacccgtttcaaatccgaaaaacgagggacgcatccttgcagaatgcgtccctccccgaaacagttatcactccaaactcagaatccccactcttcgggcacggggatccgtgtcttcacctcttcgggaacatcggggaagaaggtcatgcccatcttctcctcgatgaagctgaccggcacggcgaggcggcgcaattcggcacgtgcgctggtttccggactttcagtaaaagtttcgatccagaaaccgacggcctgcaattcatcggcggtgcactcctgaatccgtttacccgtgctgcccgacttcgtacgcaacgccatcttgaactgatgggtcggcatcgtacagagtttctgcgccgggtccggctcggcctgattggagtccgaagagtcgtactcctgccagtaatcatgctcgtagtaacagcccgccaccacgaaaagcgtatcggaaacgatgttcatattttgcacgccgtcgtcggctacaatatcgttttcgctgttccgcgtcccggcaaagagcgcctcgacatacccccagactgttccgaacgtaccggctttggcactcggctgcggagcgatgttggtcggatagaacgtctgcatgttgatctgctggttcgcaccgccgcgttcgctcgacatgcagagatgtcccttcccccaatatcccgaccgctggagataagccatcgtattgctcgtccaatactgatagggatccgaaccagagggaccgtccttgcggtaaatcttcgactgatacgccgcatcgagcgacggatccgccgtccacggatcgggatccgtacgtccgaagccgccctcgcggtagcaggcatgcatcggataggcgacccaaatcgggttatggcgccgcgtatcgtaacaataggagtaattccgcacggttttccgcgtattgacggtctgcgtccaatgcgtaaagaaggcataatcgcccgaaacgacagcctgggacgaagtcggagcggtccaattggaaggcagctcggggaaccggtagtcgccgccgtccaaatcgaccgtctgtccgcccggcccggtcgtgagcttcaagtcgtcgaaattgacgccgtagctctgcgaaccttgcggcgtaaagcggatgaagagccgctgtacgggaacagccagggtaaaatcgacggagatctgttcccagatattataagccctcgatccggtataatcgatccgctgccaataggagccgtcaccgctcaactcgatcagacagtcggccgccgtgaacgaagcgcccaaagagagggtcagatcgacctggtcgggcgtaagcgcgatgtcattcacgatgaaatacggaccgttgtcgaaccagatacggacgtagttcgcacccgaagctcccggatagcggcccgacgatccgaaattatcgttattgatacgagtccgggcggaggtataggtcacccctgccgcccccggaccggtcggattctgccatgcggcgctcgcatcggcccatcccgaaaaaggcgtctgatcgaagtcgtcgtaataaatcgtctcctccggaacgggaatctcgttctcgcatgtaatctcgacctgccgcgtcacggtctgctcgccttcgccggcggttactgtaattacggatgttttacccgcaggaaccgccgtaacggtaatcaccccgtcgttctcgcccgatgccggagaaaacaccagcccttcgtcgctcgcaacggcgctccagacggtattcgaccgcacctgaacggtattggccgaagcgtcgtcgggatcgaacgtcagtttctcgggagcaagttcgagggtcggctcgagcacggcttttccacgggttatccgcaccgaattgctcttcagttgcgtaccgttattataagtatggaccgcttcgatttcgatgctgctgtcatcgggcatccgttcgacccgaaaagagccgctgccccggccggacgatgcactgaacttacatccggcagccgacggcttcacctggagcacccaggtcagtccgtcggtcgcagtgaccgtgaactcgttttttgcaggatcctgctcgtcgaaaacaagactcgacggcgacaaagccaactgatccgccggaggtgtttcgtccaccgaaccgctgtcgctgcacccgccacagcacacagtcagcagaacaaacagacaggcagcccgaaaaggccgcaaaaaagcagtaaaattggaggtcataggcaaaataatttggttgaatgaattgacaggataaaaataacgcctttttagcttatcgtttctcgcattccatacataatccctcgcaaaagatacattattgcccgaaaaagagtatcccgtatcgtttcccgacacaatccccgacctgcaagcacttcgtccgcaacccgtcggaacgcccattctgcccgcagcttcgccgggaaatccgccccggacaaaataatctccgatccaccgcaaataaatttggcactgcccggggctttcactatctttgtagaagataggaggcggtccggacaatttcagccgaccgacgaccgcagcggacgcgcggtacactcgcggacttcgccccgcacgcagacaggaagtcgaaaattttcgacgaccggaagcacagcctgcaaacggtctttgccgaacgtagcggacgaagacagaagttcgaagtcaagtttggcttatcgccctccttttcttatctttgcaaactcgaaatcaacacccaaaaacattcaatatgagcatcgaactcagtgaacaggaacagttacgacgccaatcgctcgccgcactgcgggaactcggcatcgacccctatcccgccgcccgctacgaggtgacggccacggcacgcgaaatcgccgagaatttcgatccggcgaagaataatttccagggcatccgcatcgccggacgcatcatgtcgcgccgcatcatgggcagcgcctccttcttcgaattgcaggaccacacgggccgcatccaagtctatatccggcgcgacgacatctgtcccgaaggagatccgacgctttacaacacggtgttcaagaagctgctcgacatcggcgacatcgtcggagtcgagggtttcgcattccgcaccaacaccggcgaactgtcggtacactgccagaagctgaccctgctctccaaatcgctgcggcccctgcccgtcgtgaaagagaaggacggacagaccttcgacgccttcaccgaccccgaaatccgttaccgccagcgctacgtcgatctgatcgtgaatccccacgtacgcgaggttttcatcaagcgttcgaagatcatctccacgatgcgcgaatatttcaaccagttcgggtacgtcgaagtcgaaaccccgattctgcagcctattccgggcggtgcggcggcacgtccgttcattacccaccacaacgcgctcgacatcgaccaatacctgcgcatcgccagcgagctgtacctcaagaagctgatcgtaggaggcttcgacggcgtgtatgaattcggcaagaacttccgcaacgaaggcatggaccgcacgcacaaccccgaatttaccgttatggagatttacgtagcctacaaggactacctctggatgatggagttcaccgaacggatgctcgaaaaggtcgccctggccctgcacgggaccacgaccgtgcagatcgacggccgggagatttcgttcaaagccccgttccgccgcctgacgatgacagacgccatccgcgaaaagaccggctacgacatcacggggcagagcgaagagcagctccgcgaagcctgcaaacgcctcgaagtcgagatcgacgacaccatgggcaagggcaagctgatcgatgccatcttcggccaatactgcgaggaggagttgatacagcccaccttcatcatggactacccgtgcgagatgtcccccctgtgcaagcgccatcggtcgaatcccgacctcacggagcgtttcgagctcttcgtcaacggcaaggagctctgcaacgcctactccgagctgaacgacccgatcgaccagttggagcgcttccaggagcagttgcgcctctcggagaagggcgacgacgaggctatgttcatcgatatggacttcgtccgcgccctcgaatacggtatgccgacctgttcgggcatgggtatcggcatcgaccgcctgacgatgttcatgacgggcaacagttcgatccaggacgtgctcttcttcccgcaaatgcgccccgaaaagaaggccgtaaacgatcctgccgagaaatacaccgccctcggtattcccgaagagtgggttcccgtcatacagaaaatgggctacctgacagccgattcgctcaaaaagctctctccgggcaagttcttcaacgacctgtgcggttttaacaaaaagaacaaactggggctgaaggctccttcgatggaagaggttaaaaaatggtgcgaacaggagtaaattccggaaggtaatgacatcgggaagaaacatctggctcgcaggcatctgcgccgcaagcgtactcgctgcgggactccggctcggcgacatcgtacccgactgggtattccgcacactttgcacgctggcgctgggtacgatctggctccgccttgggcagcaggtgtggcatcggttgcggcaacggcagcgcccctggttcctcttttggaactatgcacttcccgtgctggtcgccatcccgacgctggccagcctctccgacgacgtcgttcccgtggaccagcgatttctggccgctgctgcgaccggagcggttctcgcctgcatctatcgtctaatctatcttaaaaacaaaaatatgagaaagaaaatcgttgccggcaactggaagatgaatacacttcccgccgaaggcgtcgaattggccgaaaacatccgggccgacagaaaccaggtttgttcctgcgtgaatttcatcgtatgtccgcccttcacccacctcggcggagtcatcgaggcacttcggggttcggacatcgaagtcggcgcccagaactgcgcggccgaagacaaaggcgcctatacgggcgaagtatctgccgcgatgctcgcagccttgggctgccgttacgtcatcctgggtcactcggaacgccgccagtactacggcgaaacctcggcgacgctcaacaaaaagatggcgcaggcattcgccaacggtctgcaaccgatctactgcgtgggcgagaacctcgaggaacgcgaagcggaccgccacttcgacgtagtaaagacacagatcgaagaggttatctacaacctcacgccggcccagttcgcccgaaccgtaatcgcctacgagcccgtctgggccatcggcacgggcaagaccgcgacggcagagcaggcacaggaaatccacgcctacatccgcacgatcctgcgcgagaaattcggtgcggcggccgatgaaactcctatcctctacggaggttcctgcaaaccgtcgaacgccccggaactcttcgccaaagaggacgtggacggcggcctgatcggaggagcggcgctgaaggccgccgatttcctggctatcggcaaaggttttccgcaaaaataattttgtgtcttaaagtattgacagaccggataatatccggtctgtttttattttatccgaaatctctcgctgaaaaaaaatcaaaaaaaagttgcattgtgaaaaaaacgcgtacatttgcatccaaagaacagtagaaatgacaagattttcgacgcagaactggtggtggcgctctttgtttaaggtaaacaatgagtccattggtatttgtatgaaataagccgagaaaatccgatccatacagtcaaaaatatcaaaagcgttgtttgccgagcagacaacgcttttttcgtaactcccacgtaatattgaaaattacaatataataaaaacaaacgattatgaaaacgaaaaaaattatcctacccgaatcccagatgccgacccaatggtacaatattgtcggcgatatgaccaatcgaccgcttccaccactgaacccgacgaccaaaggacctgtgacactcgaacaattgagtaccattttcgccgaagagctgatgaagcaggaattgtccaccgaacgctacatcgacattccggaagaggtgcaggatctatacaagatctaccgctctaccccgctggtacgtgcctacggcttggaaaaggctctcgacaccccggccaagatctacttcaagaacgagagcgtatcgcccgtcggctcgcacaagaccaacaccgcgattccacaggcttactacaactacaagcagggaatccgccatctgaccaccgaaaccggagcaggacagtggggagccgcgatgtcaatggctacgcagcacttcggcatcgacctgaaagttttcatggtcaaggtgagcttcaaccagaaaccctaccgcaagctgatgatgaacacctggggcgcagacgtgtatgcctcgccgagcgaaattacagccgccggacgggccgcccttgcaaagaaccccaacgattcgggcagtctgggcatggcgatctccgaagccgtagaaatggcgctgcaaaatcctcaggatacccgttactgtttgggttctgttttgaaccacgtactgttgcaccagacgatcatcggcgaggaggccgtgaaacagatggagctgttcggggagtacccggacgtggtgatcggttgcttcggaggaggcagcaacttcgccggcatcagcttctcgttcctgcgcgataacctgaccaaaggtaaaaatacccgcgtaatcgccgtcgaaccccaatcgtgtcccaagctgacgcgcggtgagttccagtacgacttcggcgacgtggcaggcttcactccgctgctcccgatgtacacgctgggccacaacttccacccgtcggacattcacgccggaggtctgcgctatcacggagccggttcgatcgtgagccagctgctgaaagacaaggtcatcgaagcccagtccgtgccgcagacggaaactctggccgcaggcgttctcttcgcccgtacggaaggtatcatcccggctccggaatcggctcacgccatcgcacaggcgatccgcgaagcgaaacgggcgaaggaggaaggcgtttccaaaacgatcctcttcaacctctcggggcacggacagatcgacctgtacgcatacgagcagtatttcgccggaaaacttcgggattatgaaatttcagacaacgaaatccgcagtacgctcaacgagctggaaaaaattatctaacagcgcaactttttcatagcaaattttaacagtggcggcggatgaaatgtttcatccgtcgcttttttcatcctcggcctgtccattcatctacaaaaaaactgtacaaagagcttccgtctccgcaacatcttcccgttctcccaaatgcggtccgtcatccctcttttgtggaaaatcgtccggccagccgactcgtacaagcaatacgatacgcctcatcgacagtgcaatcctaaaacgcacccctcgcaaagcaccacataatgaaggaatagcctgaagtaaagtcccaccattgccgatgcaacgaataccgacagaaccggaatcatccttgccacagatttacccctccgcccgccgaacactccgtataagattcggcattggcagtaatgcggcataggtcgttaaattccctccccccctccataaaatcccgtgcaaaccaaaataataaccgaataaatgaaaaaactatggcgattctgatcgggttaaagttgtgaagccgttacgaaccaaaataacgacagccctgggaatgccaagtaaccgaatcagcttcggcggacaaaagcgacgtgcttccgaaaacagaccgaaccggaaacaggacgaaatcgagagcaaagagtattgtcacgaaaaacaaagaatacgggctactgttttatgtgctattttgaccaataagccagaatacggaaagtcataccggaaccggcctgcaaagagatctatgccgcctcggattttccgaacgatccggaaatatgaattcaagtccgacggcaccacaaaaaaaggacgatgtcgaaacaccgtcctttttcttccaaccgtattcggaattacatcttcttgcccacgttggtcttcttggcaaccttcggagcagcgactttcttcgcaccggccgcagccttggaagcagccggcttcgcagccgcagctttcttggcagccggtttcgcagctttcttctcctcgccgccttcagtggccggagctgcttcggcagcagcatcggcagccttcttaccgcgcgagcgacgggtcttgggtttcgcctcggcagccgtcggaagaatacccaacgtgtaagcctcgttgaaatcgacaaattcgatgatgcacatatcggcggcatcgcccaaccggaatccggtcttcaggatgcgggtgtaaccgcccggacgatctgcgattttcggggcgatcgtgcggaacagctccgtcacggcctccttctgcttcaaatacgagaatacgatacgacgcgaatgggtcgtgtcctctttcgacttggtcaccagcggctccacgaactgcttcacagccttcgccttggcaacggtggtctcgatacgcttgtgcagaatcagcgacgacgccatgttcgataacatagccttgcggtggccggcctgtctgcccaggtgattgaaattcttattgtgtctcatttaagttagtctttatcaagtttgtagatagatacatccatgccgaacttcagattgagcgacgcgagcagctcgtcgagctccgtcagcgacttcttaccgaagttgcggaatttgagcagatcgttgcgattgagtttcaccaggtcacccaccgtatccacatcggcggctttcagacagttcaaagcacgaacgctcagatcctgatccgaaagtttcgtcttgaggagttggcgcatgtgcaggatatcctcgtcgaactcctccgcaccgttcgtatcctccatattcacggtgatcttctcgtcggagaagagcatgaaatgttggatgagaatcttggctgcttccttcaaagcatccgtcgggtgaattgatccgtcggtagtaatctccaaattcaacttctcgtagtcggttttctgttcgacacggtagttctcgatcgaatatttcacgttcttgatgggcgtgaaaatcgagtcgatcggaagcgtaccgaactcacaatcggcgggagtattctcctcggcaggcacgtaaccgcgtcctttgccgatggtgagcgtgagttgcattttagtaccgggtgccagatgacagataaccaattcgggattcaataccttgaagaacgagaggtagttcgaaatatatcctgccgtcagctccgttacacccgccacattgaccgataccttctcggcatcctggttgtcaaccgtgcggataaaacgaacttgcttgagattcaggatgatgtcgatcataccttccatcactccagggatagcggcaaactcatggtccacgccggcaaccttgacggtcgtaatcgcatacccctccagcgaggagagcaggatacggcgcaaagcgttaccgacggtcataccaaacccaggctccagcggtcggaattcgaactttccgaacgacgaagtggattcgagcatgataaccttttcaggtttctgaaatgctaatattgccataatattgaattggttgtttaattactacttggaatacaactcgacgataagctgctccttgatgttttcgggaatctcctcgcgctcgggacgctgcaggaacttgccggccatagccgcaccgtcccactcgagccaagcgtagcggctcttcgaaccgccggccagagatccgacaatgacttccaaacttttcgacttttcacgtaccgacacgatgtcgcccactttgagcgagtaggacggaatattcaccacgttgccgtttacgcagatgtggcagtgcgacaccaactggcgggcagcggcgcgcgtcggagcgatgcccagacgatataccacattgtccagacggcattcgagcagcttcagcaggttctcacccgtgataccgcccatacgggcagcctgctcgtacgtacgggagaactgtttctccagaagaccgtacgtagccttcgccttctgcttctcgctgagctgctggccgtactccgatacttttttgcgcttgcgtgcaagaccgtgctgtccgggagggaaattccgcttctcgagaactctgtccgcaccgaaaatagcttcgccgaactttctggcgatcttggatttaggtcctatatatcttcccattgtattaactttttaaaatcagataaaatagtttttacgtaacacctgccggccgaattatacacgacggcggttaggagcacggcaaccgttgtgcggcatcggagtaacgtcgatgatctccattacctccagaccggctccgtggatggtacgcacggcagactcacggcctgcacccggacctttcacgtaaactttcaccttacgcaaacccatgtcgtaagcaaccttcgcacaatcggcagaagccgtctgcgctgcatagggagtatttttcttcgaaccgcggaaacccatcttacctgccgaagaccagctgattacgtcgccgacctcgttggtgatggtgatgatcacgttgttgaaagtagagtgtacgtaggccatacccacggcaccgaccttaacaaccttcttcttgactgttccagttttctttgccataactctctaattattacttcgttgcctttttcttgtttgcgacggtcttcttcttgcccttacgcgtgcgggcattgttcttggtgctctgaccgcgaaccggaagacccagacggtggcggataccccggtagcagccgatatccatcagacgtttgatattgagctgtacgaccgaacggcattcgccctcgaccttgatacccatatccgcgatcttcgaacgaattgcgccgacctgttcatccgaccaatcctgaaccttgaggtcgtagctgataccggcctcgtcgagaattttgcgggcggtcgagcgaccgatgccgtagatatacgtcaagccgatctcgccgcgtttgttttttggtaaatctacacctactatacgtgccataaaatttctctttctttaattaatcgtttaaacattacccttggcgcattttaaacttgggattcttcttgcagatcacataaagtttgcctttacgcttcacgatcttgcaatcctcgcttctctttttgattgatgcttttactttcatggttttcaagcaatctaatggttatttgtacctaaacgagatacgccccttactcaaatcgtaaggcgtcatctccactttcactttatccccgggaagaatcttgatgtagtgcattcgcatcttgccggagatatgggccgtgatcacgtggccgttatccaactccacgcggaacatcgcgttggacaacgcctcgatgatcgtaccgtcccgttcgatcgcagtttgttttgccatagagtcttacttgtttattgcctgttcgataatactgaaatccgtcagaacgtccggtccgtccttgcccaccgccaccgcgtactcgaagtgagccgccggcttgcggtcacgggtcgtaaccgtccaaccgtcccgttcgaaaaccaccgccttggtgcccatgttgatcatgggttcaatacagatgaccattccctgtttgagaagcggtcctctgccgcgtgcgccgtagttcggaacacccggggcctcgtgcatcttacgccccagaccgtgtccctccaactcccggacaacgccgtagccgaaactttcggcatactcctgcacagccgcggaaatgtcgcctacgcgatttccggccttggcctgtgccgtacctttgcgaagagcctctttggtgacttccatcagttgccgtacttcctcggcaacttctcccacggcgaacgtataagccgaatcaccaacaaaccccttcataaacgtaccgcaatccaccgatacgatgtctccctcacggagaactctcttggatgacggaataccgtgcaccacctcttcgttgatcgaaatacacagcgaagcggggaatccctggtatccgagaaaagcaggaactgctccgtgcgaacggatgaaatcctcggcgagggtatccaactccttggtcgtaacgcccggtgcgatgtggcgacccacctcggccagcgtccggctcacgagaagattgttctcacggagcagctctatctcttcttcagtttttaagtatatcattctttcagaactctcttgaacaacaattagtagcggccctgaatgcgtcctgtcttcatcagaccgtcatagtgacgcatcagcaggtagctctctatctgcttcagagtgtcgaggatcacaccgaccataatcagcagcgaagtacctccgtagaaataggcgaacgcctgctgaatgttcaggaacttcatggccagcgccggcagaatcgccaccagagccaggaagatggaaccgggaagagtgattctcgtcatgatggtatcgatatagttcaccgtcgccttgcccggctttacacccgggatgaagccgccgttgcgcttcatatcgtcagccatcatttgaggattgataataatcgccgtgtagaaataagtaaaggcgactaccaggatgccgagcgtaaggttgtaccagaagccgcgcatgtcggagaatgccgcagcaaaaccgggcgcaacattggcgaacaacatcggaataaacatcagcgcctgcgcgaagatgataggcatcacgttcgcagcattcatcttcagggggatgtactggcgtacacctccgtactgtttgtttccgacaatacgcttcgcatactgaacggggatcttacgaacggcctgtaccaaggcaaccgtagccatgaagaccaggaacagcaacaccagttcgaggatcagcatgatggcgctaccgtcggaggtctggaagcgggcgttgatctcggcgagcaacgcgtgcggcagacgggccacgataccgatcatgataatcagcgaaataccgttaccgatacccttgtcggtgatcttttcgcccaaccacatgatgaacatggtgccggcgatcatgatgatcgtcgcatacgcaaggaagaggaatgtgtttccgtaaacgaatgcgtcgggtacctgacggtacaggttcgtaatatacgcaggaccttggatcaacaggacgatgatcgtcagcatgcgcgtccactgattcattttgcggcggccgctctcaccctctttctgcatcttctggaagtaaggaatcatgatgcccatcaactgaatgatgatcgaagcggtgatgtacggcatcactccgagtgcaaaaatcgccgcattgccgaatgcaccgccggagaatacgttcaacaggcccagaagaccgttgccctccaactgactggcaagcgccgacccctcgcccagggcgttggggttgatgcccggaatgaccacaaaacagcccaagcgatacacaagcagaagacccagcgtatagagaatacgcttgcggagctcctcgatcttgtatatgttcttgagggtttctacgaatttcttgttggtcgccagcagcgcgatgatcgcaactacgacgataccaacaatcagataaccataaccattcataatattgggttttgcgggttattacaatttttccacgttgcctccggctgccgtaatcgcagcttcggcactcttcgagaaagcgtgagccttcaccgtgagggctttcgtaatcgcaccgttacccaggatcttcactttgtcgttcgaagagatgaagccggcagctaccagcgtgtcgatcgtcacctccgtcaggtttttcttggctgcgagttcttcgagcgtcgaaaggttgatcggcttgaattccactctcttcagattggtgaagccgaacttcggcaggcgacgctgcaacggcatctgaccgccttcgaaacctaacttacgcgaataacccgaacgcgactgggcacccttgtgaccgcgcgttgccgtaccaccgtgtcccgaacctgcaccgcggccgattcgtttatcgtgatgcgttgatccctttgcgggtttgagattattgagttccatcgtttatcagttcttaaacattttcaattatttaacctcctcgatcgttacgaggtgcttcacacgctccagcatgcccttgatgatgaccgaatcttcatgctcgacgctctgacggatcttgcgaagaccgagtgcatcgagatttttgcgctgctgtgcagtggcgccgatgcggctcttaacttgagtaattttcaatcttgccatagtcttctttccaattaaccgttaaacacctgattcatcgagataccgcgcaactgtgccacgctgtgagcgtcgcgcagctcgcagagagcggcgatggtagccttcaccaggttgtgggggttcgacgaacccttgctcttggcaagcacgttcttcacgcctaccgactccagcacggcacgcatggcaccgccggcgataataccggtaccgggagccgccggacgaaccatcaccagcgaaccgccgaaacgcatctcctgcttgtggggaatcgtaccgttgattacgggaatcttcaccaggtttttcttggcatcctccacgcctttggcaatagccgaagtaacctccgaagccttacccagaccgtagcctaccacaccattctcgttgccgacgaccacgatggccgagaagctgaacgtgcgaccgcccttcgttaccttggtaacacgctgaatgcttacgagccggtctttgagctcgaggtcgcttgtgcgtactttcttcatattggtatttgccatatcgctttagaatttaagaccgccttcacgagcggcgtctgctaacatttttactcgtccgtgatacaggtaaccgttgcgatcgaacgaaacggtcgaaatacccttctcgatagcgcgtttcgcggccagttttccgaccagggctgccacgtcgattttgttcttgcccgcagcctcggcagctacttccttgtccagcgaagaagcggtcgccagggtcacgccggccaggtcgtcaataaactgcacgtagatctgcttgttgctacggaatacagtcatacggggatgctcggccgtaccgctcacgattttgcggatacgcatcttgatcctctctcttctttctattttagtcaatgccataatttactcaatgtttattatttagcacctgcagacttacctgccttacgacggagttgttcacctacgaacttgatacccttgcccttgtacggctccggcttgcgcagcgagcggagcttcgcagcgacctggcctacgagctgcttgtcgatgctcttcagcgttacgatcgggttgccctttttctccgtaacggccgtagcggtcacttcgggaggaagcatcaggtatgtatcgtgcgaatagccgaggctcatttccaggatattgcccttgacttcagccttgaagccgacgccgacgagctcctgcttgatttcataacctttcgaaacgccgatcaccatattattgatcagggcgcggtacagaccgtgcagcgaacggtgacggggttggttggtcggacgcgacaccagcacggcaggaatctctttctgcgtatgaacgtcggtgtgcgtacccacctctactttaatgtctgaatcaaccttctgactcagtgtcccaagtggtcctttcacgcttaccacgttatccggcgataccgtaacggtaactccggcaggcaagtttacaggtaatctaccaattcttgacatttgtgttgttgttatttgatgttagtaaatatagcacagtacttcgccgccgacgttctctttacgagccttggcatcggtcataatacctttcgaagtcgaaaggatggcgattcccaaaccgttcatcacacggggcatcttctccacggaagcgtactggcgcagaccggggcggctcacgcggtgcagattcttgatggcgttggatttggtcgccgcatcccacttgagcgcgatcttgatggtcgggtggccctgttcgttggtgtcgaacttgtaagccaggatgtaaccctgctcgtagagaattttagtgatttcctgcttaatttttgagccaggagcttcaaccactttgtggttggctttcactgcgtttctaattcgggtcagaaagtccgcaataggatctgtcataatgaattaaaagttaaaaattaataaaaatatgttactctttggttttcagccgtttgaattatttccaaaatacgttcaaccctctttgcatccccttatgccctgatttccgacgcctgcaaaaggcactttttcacggacatacgcgggtacaaagcgtgcaaatataggaataatttctcaataattcacaattaagccctaatttttagcgaattaagacctcttccggaaaacagagcatgtcagcatccactggagccaacatgtattctgctcaaaatcccccggaaaagtcctctccgcacgtcgtcgaaacggaccgaaaaaccgctttacagccaatcgctccccctcgtcttcgtcacaggactcaacggttgaaaatttgcatccaagtaccgaaccgttcgaaagtccctccgccgagaagttaccacctgcacggtggcactttcctcgactttgcgacaattctacttgggttccgcacccgtataggattcacctctttcgtagttcccagaccgaaaatcggtcctcaaacgggaccctgcgcacgcacatctggcgtaccggcccctgactacaacgggcataacaccctcagtagatgaatctctcagtgtgcctgcttccgacgcacctttcggagcatcttccgccggcggaacacgctttcttgctacctgtccggaaaacctcacggcttccatccccggtcgctgcggacagggaatccctccgcagcggcggtcgagacaggcaagaacactaccagctcgccttcttaacgcccgggatcagaccgttcgacgccatctcgcggaactggatacggctgatgccgaactgacgaatatatcccttcggacgacccgtcagtttgcaacggttgtgctggcggatcggattcgagttgcggggcagcttcgacagggcgatccatgcctcctcgtgatccatttcaccgctcttcaccttggcagcgatctcatcgcgtttgtgctgatagcgctttgcgagtttcgcacgcttcacttcgcgtgccttcattgactcttttgccatagcttattggttgttctttttagcatttttgaaaggaagaccgaactcacgcaacagggcataagcctcctcgtcagtcgcagccgtcgtaacgaacgtaatctccataccgaagatcttggtgatcttgtcgatatcgatctccgggaagatgatctgctcggtgatgccgagggtgtagttgccctgaccgtcgaacttctcgttgatacccttgaagtcgcggatacgcggcagagccacggcaatcaggcgctccaggaactcgtacatcttgcttgcacgcagcgtcacacgaacgccgatgggcatgcccttacgcaatttgaagttcgagatatcctttctcgacttggtctgcacggccttctgacctgcgatgagcgaaagctcctgctgagccacgtcgataagtttcttatcggcgacggcctggcccataccctggttaataacgatcttctcgagtttcggacactgcatgatgctcgtgtagccgaactccttcataagggcaggtacgatctgctccttatactgtgtcttgagtgtaggtacgtatgctgccattatttgatctcctcccctgactttttagcgaaacggactaatttacctgccgcattctgcttgcgaccgatacgagtgggtttgccgctcttcggatccagaacctgcagattcgaaatgtggatcgccgactcctgttcgatgataccaccctgaggattcttcgcattgggcttggtagccttcttgctgatgttcacgccctcgacaatggcacgctgcttctgggcatcgaccttcaggactttgccctgctggcctttgctgtcgcccgcgttgacgtaaaccatatcccctttcttaatatgtaatttaactgacatatctgaatgtgtgtttttaagattacaatacttcgggagcgagggagatgatcttcatatactgatcgcgaagctcacgagcgacgggaccgaaaatacgagtaccgcgcatttcaccctggttgttcagaagcaccacggcgttatcgtcgaaacggatgtacgatccgttggcacgtctgatctccttggtcgttctaactacgactgccttcgatacagcacccttcttgacatcgcccgaaggagaagcgctcttgacagccactacgattttatcgccgatcgacgcgtagcgacgcttcgtgccgccaagcacacggatacaaagcacttcctttgcaccgctgttatcagctactgtgagtctactttcttgttgtatcataactacttcgctctttcaatgatttgtactaatctccaacgcttcgtcttgctcaacgggcgggtctccatgatacgtacggtatcgccttccttgcaggtttcgtccaggcactcggcaacgaacttcgtcgtcttgttcacgaacttgccgtagatcggatgctttaccttacgggccactgcaaccacgatggttttctccattttgttgctgacaaccaccccaatacgctcttttctaagatttctttccataacggtaattaacatttagggtttttctgacgcagaattgtcagcatgcgcgcgatgtctctgcgggattttttgattatagacgggttctcgatcggcgaaactccgtgctgcaacttgagtttcgaaagctgcgccttctccacgtcgatgcgctcctgaagctccttgaccgacaggtcctttatttctgcacttttcatcttgatagcttagattgatgtttcaacgaaatctcgtcttacaatgaacttggtagtgataggcagcttctgggctcccagacgaagcgcttcctgagccactgccaggggcacgccttctgcctcgaagagaatacgaccgggcgtaacaggcgcaacgaacccttccggattacccttacccttacccatacgcacctcggccggtttcttggtgatcggtttgtcggggaagatgcggatccagagctgaccctcacgtttcatataacgggtgatagcctgacgcgcagcctcgatctgacgaccggtaatccaagcggaatcaagtgctttgattgcgaacgatccgtatgcaagttggttacctctttgagcgatacccttcatacgacctttctgcattcttctaaatttggtcttttttggctgtaacatggtgttcttgctttaaaaggtcctacttactgtttattattacgtttcggagcaccgccacgacgctctccgcgatcgcctctgggaccacgacggtcgccacggtcgccgcgaggaccgcgacgatcgcccgaaggctggcccgcgccctgtgccgaagccgaagcgccggcgatctcgaacagatcgcgcttgccgtaaaccgtaccctggcagatccataccttgacacccaggatacctaccttcgtaagcgcctcggtcaggcagtaatcgatgtcggcacggaatgtatgcagcggaatacgtccctctttcatcgtttcgctgcgggccatctcggcaccgcctacacgtccggaaacctggaccttgataccttcggcgcccatacgcatcgtcgatgcgatagcggttttcacggcgcggcggaacgatacgcggccctccaactggcgggcgatgttctgtcccacgatcacggcgtcaacctccggacgcttcacttcgaagatattgatctggacctccttaccggtgagtttcttcaactcctccttgagtttatcgacctcctggccgcccttgccgatgatgataccggggcgggccgtcgcgatcgtgaccgtaacaagcttcagcgtgcgctcgatgatgatcttcgagatgctcgccttcgccaaacggacattcagatacttgcggatcttggcgtcttcgaccaatttctctgagaaatccttacctccgaaccagttggagtcccaaccgcggatgatgccaagacgatttgctatcggattaactttctgtcccatttgattacttgttttctacggttaccattttgtcaactacgatcgttacgtggttcgaacgcttgcggatacggtgtgcacgaccttgaggcgcgggctgaatacgcttcagcatgcgaccgccgtcaacaaatatctcctttacacaaagtttggtatcttccagacgttctccctcgttcttggcctcccagttggcgatggccgacttgaggagcttctccagacggatcgacgcctctttcttcgagtagcggaggatacccagtgccttgttgatctccacaccgcggatgatgtcggccaccaaacgcatcttacgcggagacgtcgggcaatcccgcagaacggcgatagccttctgcttcttttcagccttcattttttcggctcttattgcttttcttgcacccattttctacctattttttcttgttacccgcatgaccacggaagttacgcgtcggagcgaactcgccgagtttgtgtccgaccatgttttcagttacgtaaacgggaataaacttatttccgttgtggacagcgatcgtctgaccaacgaagtcaggcgaaatcatacttgctcgcgaccaggtcttgatgaccgccttcttattgccctcggcttgagcgactactttcgcctcgagtttcgggtcaatgaatggtccttttttcagtgaacggctcattatgttactcttttaattattttttctttcttgaaataataaacttcgaggtcgtcttcttcggattacgagtcttgtaacccttagccaacagacccttgcgcgaacgcgggtgaccacccgacgcacgaccttcgccaccacccatcgggtgatccaccgggttcatcacgacaccacggtttctgggacgacggccgagccaacgctcacgacctgccttacccgaactctcgaggctgtggtccacgttggacacaacgccgacagttgcacggcaagttacgagtaccatacgagtctcacctgaaggcaatttgataacggcgaacttgccttcacgtgccaaaagctgagcataggaaccggccgaacgagccatcgcggcgccctgaccggggtagagttcgatgttgtggatgaccgtacccagcggaatctcgctcaggaagagcgtatttccgacttcgggagcgacacctgcgccgctcatgacggtctggccgacctgaaggccgttcggagccaggatatagctcttctcgccgtcggcatacacaaccaatgcgatgcgtgccgtacgattcggatcgtactcgatcgttttcacagttgcagcaacgccatccttcacacgcttgaagtccacatgacgatacatacgtttgtgaccgccgccgatgtagcgaaccgtcatcttacccgtattgttacgtccgcctgaacttttcttgacgctgacgagcgatttctccggtacgttcgtcgtgatctcgtcgaacgtgccgataatcttatgtcttgtaccgggtgttaccggtttaaactttcttactgccatctcttttagatattactgtaaaaatcgatcttgtctccatccttcaaggtgacgatcgccttcttgaagttattagcacggccttccagaagacccgccttggtgtagcggctcttgagtttgcccatgtagttcaccgtattcacatccgttacaaccacgttgtaaagctgctctacggcgttacggatctgcagcttattagctctaacgtcaacgataaaaccgtaacggttcagcttctcgccctgaatcgtcattttctcggtcagtattggcttaatgataatttccatttttcttgcgcgtgtttaggctaacattgtattcaaaatattctcggcaccctctaccatcaccagcgccgaagcgttcatcacttcgtacgtattgacgttcgaagccagaatggctttcacgtaggggaggttgcggcacgagagctgaagattgacgttcgaatccggcaaaaccagcaggactttcttgtcggcaaccttcagagcctcggccatcgctacgatcgacttagtcttgggagcgtccatcgaaataggctccaccacgcagatcgcacctgcctgtgccttgtaagtaagagcgctgcggcgagccagctgcttgagcttcttgttgagcttgaagctgtagtcgcggggaacgggaccgaacacgcggccgccgcctacgaacagaggcgatttgatgctgccgcaacgagcaccgcccgtacctttctgacgcttgagcttgcgggtcgaaccggccacctcgttgcgctgcttggatttatgggtaccctggcgctgatcggcaagatactgcttcacgtccaggtagatagcgtggtcattagcctccacgccgaaaacagcgtccgaaaggaccactttacggcctgtctcttttccttgtgtgtttaatacagctaattccatactatttctcaattgttaaataagcaccctttgcccccggaatcgaacctttcaccagaatcaggttgttctcgggaataattttcaaaactttcaggttcaaaactttcacctgctcaccgcccatacggcccggcagacgtttgcccgggaatacgcgcgaaggataggacgatgcaccgagcgaacccggcttgcgctgacggttgtgctgaccgtgagtctgaccgcccacgccgccgaaaccgtggcgcttcacaacgccctggaagcctttacccttggagatccccgtcacatcgacccagtcctcttccgagaacatatcgacggtcagcgtatcgcccaggttcacttcaggcatatccttaaactcagccatcttgcgtttaggggtagtgccggctttcttgaagtgtcctaacaaactgccggtggtgtgcttttcacttttgtcgtcataggcaatctgaaccgcttcgtaggagtccttctccacggttctgatttgcgtaactacgcacggaccagcctcaatgacagtgcatggtatgttcttaccctcggcactgtaaacggaagtcattccgattttctttccaataagtcctgacatttttgtcaaattacgtttgttaatataaagtataaagtgatcttcttagaactgtcgggaacatttgcgatcccgtagcggcaaaacgtgccggaaagggctgccgcaccggctcgacaccgggcggcggcacgatccgaaacaggtttcgatcagtctatcagaccttgatctccacttcgacacccgaaggaagctccagtttcatcagagcgtcgatggtcttgggagtcgatgaatagatatcgaggatccgcttgaacgtgcagagctggaactgctcgcgcgcctttttattgacgaaggtcgagcggttcacggtgaaaatctgcttgtgcgtcggaaggggcaccggaccgctgactacggctcccgtgctcttcacggtcttcacgatcttctcggccgacttatcgacgaggttgtggtcgaaagacttcagtttgattctaattttctggttcatatgtttttcttattctaattccttacgtttaccacttgccttctcgatcacctccttggcaatgttcgccggaacttcctcgaagtgcgagaactccatcgaagaggtggcacgacccgacgagatcgtacggagcacggtcacataaccgaacatctccgacaggggcactttggccttcactacgcgggcattacccttcgactccatacccgtcacctgaccgcggcgcttgttcaggtcgccgatgatgtcgcccatgttctcctcgggcgtcaccacctcgacggacatgatcggctccttgatgaccgaaccggccttgggagcggcgttgcggtaaccgttacgggcgcagatttcgaaagacaactggtcggaatcgaccgggtggaacgaaccgtccttcagggtaaccttcatcgagtccatcgtgtagccggccagtgcaccgttcgccatcgctgcggcaaaacctttctgcacggcgggaatgaactctttcggaatgttaccgcccttgacttcatccacgaaggtaagacccatcgtgccttcgtcggcaggaccgatttcgaaaatgatgtcggcgaacttaccgcgaccgcccgtctgcttcttgaacacctcgcggtgctgaacggtcttggtcagcgcctccttgtagttcacctgcggagcaccctggttgatctccacgccgaactcacggcgcagacggtccacgatgatgtcgaggtgcaactcacccataccgctgatcacggtctggccgctgtcctcatcggtatgtacggtaaaggtaggatcctcttcagccagcttgcccaatgcgataccgagcttgtcgaggtctttctgcgtcttgggctccactgccaaaccgatcaccggttcagggaaggtcatctgctccagtacgatcggcgcatcctcggcacagagcgtatcgcccgtgcgaatctccttgaagcctacggctgcgcagatgtcaccggcagcgacctgctccatcggattctgcttgttggcgtgcatctgatacagacggctgatacgctcacgcttgccgctgcgggaattaagcacgtaagaacctgcatcgagcttacccgaataaacgcgcacgaagcacagacgacctacgaacggatcggtagcgatcttgaaggccagaccgcagaacggctcgtcctccgacggcttgcgaatctcctcctgctccgtcttggggttgataccgtgaatagcgggtacgtccagcggagagggcaggaacgccatcacgcagtcgagcaacatctgaacacccttgttgtggaacgaagagccgcacaacataggaaccagtttcatctgaatggtagccgttcggatcgcagcgatcaactcgtcgggctgaatcgaagcgggatcgtcgaagaatttctccatcagcgcatcgtccaccgaagcgacttcttcgatgagcttgttgcgccactcctcggcttcggccttcatggagtcgggaatctcgcggatctcatagttatcacgaacggtcttgtcatcgaaatagtagtaagccttattataaataaggtccacgataccttcgaacttgtcttcggctccgatcgggagaacgatcgggagcgccgtagcgccgaaatgctccttgatctgggcacaaacggccaggaagtcggcacccgtacggtccatcttattgacgtaaccgatacgcggcacgttgtatttgtcggcctgacgccaaacggtctccgactggggctccacaccgcctacggcacagaacgtggcgatagcgccgtccagcacgcggagcgaacgctccacctcgaccgtaaaatcgacgtgtcccggggtatcgatcaggttgatctgatactggtggcccttgtactgccagaaagcggtcgtagcggccgaagtgatcgtaataccgcgctcctgctcctgcaccatccagtccatcgtggcgccaccttcgtgcacctcgccgatcttgtgcgttttacccgtgtagaaaagaattcgttccgaggtggtcgttttaccggcatcgatgtgagccatgataccgatattgcgagtataagttaaatctcttgccatctgtcgaatctcctaattaaaatctaaagtgtgcaaatgccttgttggcctcggccatgcggtgcatctcctccttacgcttgaaagcggcaccctgctggttgtaggcatccacgatttcggcagcgagtttctcagccatcgttttaccggcgcgcttgcgggagtaaaggacaaggtttttcatagaaatcgaaatcttgcgctccggtcgaacctccataggaacctggaatgtcgcgccaccgatacgcttcgacttaacttcgacttggggcgtgatattctcgagagcctgtttccagacttccagcggagatttatcagcatccttcatcttcttgcccaccaactccagagagtcataaaaaatggtataggcaatactcttcttaccatccagcataaggttgttcacgaaacgcgttactgcgacatcgctgaacttcggatccggaagtagaattcgcttctttggcttagcttttctcattgttattggctaaattaatgttttgtcgtagtcctgatattacttcttgcctttagcgggagccgctgcacctgccttggggcgttttgcaccgtacttggaacgacgctgacggcgtccgtccacacctgcggagtcgagagcaccgcgcaccaggtgataacgcacacccggaaggtccttcacacgaccgccgcgaaccagcacgatggagtgttcctgcaagttgtggccttctccggggatataggcgttgacctccttgccattggtcaatcttacacgcgccaccttacgcatcgccgagttcggcttcttcggggtcgtggtgtacacacgcgtacaaacgccccggcgctgcggacacgcggccagtgcgggggacttgctcttgtcctccagacgtactcggccgtttctcactaactgttgaatagtaggcatttcttactgtttttgtcctttaataaatggtttgaatttcaatctccattgtccaaaatggactgcaaagatacgcaaaaattccgaaccgccatatataagtgcaacattttttgccgttccagcccgatttttcagcattttagcccatttcagcccttttatcgattctttttatttatagaatttacaagcatataatataatgcttatatacaaatccgcaacttactgacaataaaacctatctgctctccgcgaaataatctttcggcctccagccggcctcccgcttcaccaaagcgcaggctccaccacgacatccggacagctcatccgggtctttcaccccaattctccgaagcaaagggcaagcctctctcaatcaaaaaattgagatccgtttccggcttccgccatctttccgtacaggaaggcgggaccggacccgaaacggaaaccgaggacatacgaactccgccgtacaacgaacaggggtcccgaaaagaggccgacaaacgaagagtatcaggagtatttacaaatgataccggatccggaaaacggagaaacaagttcaaagtcaagtccggcccgtcgcctcctttctccatttacagaagacagaatacggtccggacaagtttggctcgacgcctatctttcactatctttgcagaagatcggatacgcctcggaaaactgcgagcaagctcccattttcttctcggctttcactatctttgcagaagacaggaggctgttccgaaatcttggagaataaattctcccgatttcgccgggctttcactatctttgcccctgaaacgaaaacaattcaaacctatggagtacaatttcaaagagatagaagccaagtggcagcgccgctggcaggaagaggaaacctatcgcgtggaagccgatcccacacgtcccaaattctacgtgctcgacatgttcccctacccttcgggtgcgggtctgcacgtcggacacccgctgggctatatcgcttcggacatctactcgcgctacaaacggctttgcggcttcaacgtacttcatccgatgggctacgacgctttcggcctgcctgccgaacagtacgccattcagacgggacagcaccccgccgtaacgaccgaacggaacatcgcccgctaccgggaacagctcgacaagatcggcttctcgttcgactggcaccgtgaggtccgcacctgcgatccctcctattacaaatggacccagtgggcctttctggagatgttcaaacactactacgaccgcagtacggacaaggccgaaccgatcgaaaaactcgtcgcccgtttcgaggcgcagggcaccgaaggactcgacgccgcctgcacgcaggagatgcgtttcacggccgacgaatggaaatccaaaaccgaagaggaacgcgaacagatcctccagaactaccgcctggcgttccgcgccgacacgatggtcaactggtgtccgcaactgggcacggtactggccaacgacgaggtgaaggacggactctccgaacgcggcggctttcccgtcgaacagaagcggatgaaacagtggctgctccgcgtaacggcctacgcccagcggatgctcgacggactggagcggctcgagtggagcgactcgctgaaggagatccagcgcaactggatcggccgttcggaaggcgcccaggtcttcttcgatatccagggctccgaccgaaaactcgagatattcaccacgcgtcccgacacgatcttcggcgttaccttcatggtcatcgctccggagcacgaatgggttcacgaccttaccacgtccgaacaacgggccgccgtcgatgaatacatcgcccaggcgaaaaaacgctccgagcgggagcgcatcgccgaaaccaagcgcgtaagcggtgtagcgacaggctcctatgcgatcaaccctttcacgggcaaggcgattccgatctacatttcggactacgtgctggctggctacggcacgggggcgatcatggctgttcctgcccacgattcgcgcgactacgccttcgcccgccatttcgggctggagatcatcccggtcgtcgagggcggcgacatcgagaaagagtcctacgacgccaaatcgggcaaactgatcaactcggatctgctcgacggactcgatgtaaaggaggcgatcggtcgcatcctgggcgaaatcgagcgacgcggattgggccgccggttagtgaactaccgcctgcgcgatgccatcttctcgcgtcagcgctactggggcgagccgttcccaatctactacaaggagggcacggcctatccgctgccggaagagcggctgccgctggagctgccgccgatcgacaacttcggcccgaccgaacagggcgaaccgcccttggcacgggccaaggagtggacgacgcccgaaggctatcccctcgaagtatccacgatgcccggattcgccggatcgtcggcctactacctgcgctacatggatccgcacaacgaccaagcgctcgtgggccgcgccgccaacgaatactggcgtaacgtcgatctctacgtcggcggcatcgaacacgcgacaggacacctgatgtattcgcgcttctggaacatgttcctctacgacctgggatatgtctgcgaaccggagccgttcaagaaactcgtcaatcagggtatgatccagggccgttcgaatttcgtctatcgcgtggtcggcaccaacaaattcgtatcgctcgggctgaaagaccagtacaaaacccaggagatccacgtcgatgtgaacatcgtgcgcaacgacatactcgacctcgacgcgttccgcgcatggcgtcccgaattcaaggatgcggagttcatcctcgaagagggcaggtacgtctgcggctgggcgatcgaaaagatgtcgaagtcgatgttcaacgtcgtgaaccccgactacatcgtcgataactacggcgccgacacactgcgcatgtacgagatgttcctcggcccgctcgaacagtcgaaaccgtgggacacgaacggcatcgacggcgtgcataaattcctgcgccgtttctgggccctcttctacaaccgcgaaggacaactgatccttacggacgaaaaagccacggataaagagctgaagacgcttcataaaacgataaaaaaggtgcgcgaggacatcgaaaatttctcgttcaacacctcggtcgccgctttcatgatctgcctgaacgagttgggcggctgcccgaagcgcgagatcctcgaaccgctgaccgtgctgctcgcccccttcgcaccgcacatcgccgaggagctgtggcacacgctgggacacacgacctcggtctgcgacgcgcaataccccgtctgcgaggagaaatacctcgtggaaagttcgttcgaatatccggtttcggtcaatggaaagctgcgtttcaaaaaggaatacgccctgacgctctccccggccgacatccaggcggacatcgtacgcacggacgaagcgcagaagtggctcgaaggcaaggccccgaaaaagatcatcgtcgtaccgggcaaaatcatcaacatcgtaatctaaacgaccgctctgcggaatatgcgattcgggggagaagcgaaaacttctcccccgaatcttttaaccgctccgcgatcaggcgatcagaccggacagatgaaatttacgcttgcagtagcgttcgcactgcatcgaaatatcataacccaacatgatgcccagcatgaaatcctcctcgggagtcagtttgttcagcggtttatcgacgaacgtctgcacggcgtccaggcagctacgcttgccgaaatagagattgaccttctgctccgttaccggctgcaacagatagtcgataccctgactgcgaagccgttcgatcagcagcccggcacaggtcgggcacagcgtgcagagcaccagatcccgaacgcccttacggaattcgtagatatgatgcagcagcatcttcatattgtcgtatcggctgaaatccccggcactcatggcattcggttttagccgatggcggcgatccacaactccatccgcatctggttctcggcgtccgacgcgctgtcgtccacggcccagccgatcgcctctccgtcctgacacagccgcgaaccgcaccccggatactcctcggcgtcgaatcccccgacgaacgtgcagcccgtcgaagccagtccgtcccgaatttcggccatcgcatcgcagaaagtatcgctgtaaatacccgcatcgccgcagccgaacagcgccacgcggcggccggagaggtcttccttccccaacttgtcgagaaatcccggccagtcgtcctgcaactctccgctgccccaggtcgatgaccccaacagcagcagatcgtatttcttcacatcttcgacggacgcagccgccacattatgcacatcggcctgtgctacgccgagccgctcggcgatcctggcagctacggactccgtagtcccggtcgtgctgccgaaaaaaattcctgtcatctttttatttggttttatgagtgaacttcctgttgcaaaggacgcggattttccgacggcggacaaccccgcgtattggggattttcccggggcgccctccccggaaaatgcgtcgccatatatggggataaccgataatccgaagcggaattccgacattcaccgcgcagcacggtcttgccgggagagcacgggccgggacaaatccaaataaatttggcattgctccccgcttgcactatctttgcataagataggggcatctcggaaatctttgggaataaattctcccgatttcgctcggctttcactatctttgtacccaaattaaattatatggcagacaattccatactcaccagactggacggtctgaagctcaaatacgaagagatcggccagaaactcaccgatcccgaagtgatcgccgacgtcaagcagttcatccaattcaacaaggaataccgggagctggaaccgatcatcgaagcctccgaacgctaccgcacggccatcgccaacctgaccgaagccaaagacatcctggccaacgacaaggacgaggagatgcgcgaaatggcacgcggggagatcgcggaactggaaccgaagatcgaaaccctcgaagaggagatcaaactcctgttgattcccaaggacccgcaggatgccaaaaacgcgatcgtcgagatccgcggcggcacgggcggcgacgaagccgccatcttcgccggcgacctgatgcgcatgtacaccaaatacatcgaatccaaaggctggaagtacgaaatcacctccttctcggaaggcacggccggcggatacaaggaggtcgtgatgaaagtcacgggcaacaatgtctatggtacgctcaaatacgaatcgggcgtacatcgcgtgcagcgcgtaccccagaccgaaacgcagggccgcgtccacacctcggccgcttcggtggccgtactgcccgaagccgaggagttcgacgtagaaatctcgatgaacgacatccgcaaggatatcttctgcgcttcgggccccggcggacagtcggtcaatacgacctactcggcgatccgcctgacgcacatcccgaccggtatcgtcgtgcagtgccaggaccagaaatcgcagctcaagaacttcgacaaggctttcgaagaacttcgcacccgcgtcttcaacctcgaatattcgaaatacctcgacgaaatcgcctcgaagcgcaagacgatggtttcgacgggcgaccgttcggccaagatccgcacctacaactacccgcaggggcgcatcaccgaccaccgcatcaactacacgatctacaacctgtcggccttcatggacggcgacatccaggactgcatcgaccatctgatcgtagcggaaaacgccgagcgcctcaaggagagcgaactctaacacacctccgacatggcccttcccgaaggattcgacgcggaagtctattcggtcgtggcgcaaattcccgcagggcgcgtaacgacctacggacagatcgcccggctggtcggcatgccgggatatgcccgccgcgtgggacatgcgctggcagcggctcccgccggacttccctgccaccgggtcgtaaacagcgcaggcagaaccgcgccccattggacggagcaacgtccgatgctcgaggcggaaggcgtccgcttccgaaagaacggctgcgtcgatctgacccgctcgggctggaaggaggtcctctgaaagcaatattccgtgaccgaaacccgttctgcggataaacgaaccgtatgaaaaaacagctcatactcctgttcacattggccttcgccgggatcttttccgctgcggcgcaggaccccatatacgtagtcaacgggcaggtcgtaagcgacatccgcaacattccgccgggcgacatcgaatcgaccgagatgctgcctgccgacgagcagaccatcgcccgatacggaacagaagcctcgaacggcgtgatactcatcaccctgcgatacgacaccccggctcgcttcccggaagcagacggcagcttcaacgactatatttccgaacagaccgattgggatgattctctgccggcggcacgggtagtcctgcgttacaagatcacgaccgacgggagaaccgtcccgaccgacgagctcgaagcgaccgaccgaaggctgcggcgccgtgtgatcgacgccgtcgaaaaagcaccccgctggcagcccgccatgcgcgacggaaagccggtagaaagcgaaggggttctgcgcgtacaactgcccgaaggcaaaagcgttccgcgccccctggaattcatcatgcgctaaatccgaccaaaccgctccgaaacttgaaaacgaactcgctctccgcatggattctggccatccggccgtacagtctggggaattccgtcatccttattctcatcggatcggccctggccttcactgacggcggcttccgcccggtcgtcgctctgctgtgcctcgttttcgccgtgacgatgcagtgtacggccaatctggtcaatgatctctgcgactttttgaaaggagccgaccgccccgaccgactgggtcccgaccgcgctttcgccaaaggttacatcaccctgcgggcgatgaagagcggtatcgcggctttcactctggcggcctgtgcagccggagcgggattgctggccctcagcggctggaactggtggctcctgctggtgggtgcctcctgcatcgtcttcgcctacttttacacggcaggcccgtggccgctggcctatcacggtatgggcgacatagccgtcatccttttcttcggcctgattcccgtcggattcacctactacctccagtgcggagggtggagcggagaaaccgccgtagtcggactggcctgcggcatggtgatcgacacgatgctcatgattaacaatttccgcgaccgggaggaggaccgccgctgcaacaagcgcacgatcgtcgtctgcctcggagccgcagcgggacgctggggttacctggttctgggcacaggagccatcctgctgtgcctctcgctgttggccgaaggccgtatcgccgcagctctgctgcctctgccctaccttgcagtccatatcgccacatggcgcaagatggtacgcatcgaccacggcgaagaactgaacgtctgcctcggcgaaacggcccgcaacatcctgctcttcggcgccctgctgaccgcaggcatcctgctcgacaaaatcctgtgctaacaacggtcggcacctactgtccccgccccgaccgcacttcgcagtgggtatcatgcccgatttccgaaattctgacgatcccaacccaaagtcgaacacaacgaccgtcgcacggcagaccgacggcgccatccccggaaaccgaccgtccccaaacgatcgacctgccggaccgagattcgccgccctcgcagaaaagagagcacggtccgcacaagctcgaaccaccggagatcaaaacgagcgcaaaggacgccagccgactctgcccggcgaaaagacggaaaacccataattaagttcggtgcatcgcccttcttccgttatcttcgctcaagatcggaggcggttcggcaatctttgcgtgcaagcccgcacgattgctctcacctttcactatctttgcagaagataggattcgcctcggaaaactgggaacaagttcccgttttttcccggctttcactatctttgtcgtcatgcaaaaccacctgacactctcccagctccaaaagctcgtcaaagcgacgctcgacgaagcgttcgccctgcccgtatgggtcagtgccgaaatcgcggagatcaaaatcaactattcggggcattgctacctcgaactggtcgaaaagggtggcgacaacggcgtgccgctctcgcaggcccgggcggtcatctggcgcacggcttacgcccgcatcgccggctatttcgaggccgaaacgggtcagcgactggccgcaggcatccgcatcctggcccgggtgatgatctcctaccacgaactgtacggtttctcgctcaacatcctggacatcgacccgaccttcacgctgggcgacatggagcgacagcggcagatcaccatcgagcggctccagcgcgaaggagtctgggacatcaaccgcgaaaatcctctgccgcaggtagtacagcgtatcgccatcgtttcgagccgccaggcagcgggctatcaggatttctgcaaggagttgggcaaaagtccctatgctttctccctgacgcttttcgacgctttcatgcagggcgccggtgccgaggattcgatcgtggcggcactcgacgccgtggccgaccgcatggacgatttcgatgcggtcgtactgatccggggcggcgggtcggccagcgatctgaactgtttcaatgcctaccgcctctgcgcccacatcgcccagtttcccctgccgatcctcacgggcatcggccacgacaaggatacgagcgtcgcggacatggtggcccacacggcactgaaaaccccgacagccgtcgccggatggctcgtcgaacggatgacgggcgtcgagggatggctcgacaccgccgccctgcaactgcgtgacgcctcggcgggcatcttccgccgccatgaactgcggctcgcggagctcggcagcgaaatcgcgcatcaaagcgccctcctgctcctgcgtcgcaacgaacagctctcccgctggagcgacgagctttcggccgctgtcggcgagctcctgcggcggcaacacacacggctcacgaccgccgaagagctgatcgcaagccgttcgcccgaacatattctctcgctggggttcgccatcgtacaccggggcgatgaaaccgtcacttcggccaaagggctttcctccggcgacactctgcgggtggaactgtccgacggcacattcgatgcaaccgtaaaataagcaacctgacaatatggcaaagaaagagattacctataccgaagcgatgaacgaaatcgagcagatcctcgaccgcttccgccgcgaagagatgaccgtcgattcgctgaccaaggaggtcaagcgggctaccgaactgatcgccctctgcaaggagcggctgcaccggacggaagaggagctgaaaaaaatctccgaataagatgaaaaggctgattcgctgggcactcaaccacctgccccgcacgtttctgcaacgcatcgccggaatatcggttccggtgctgggatggttttatatcggccggggcgtcgaatgtcccgtctgcggcacccggcggcgcaagttcctgccctacggctacgtccactcccgtccgaacgccctctgcccccgctgcctctcgctcgaacggcaccgcctgctatggctctacctgcaacgcgaaaccgacctgccgaccgcgtacccccgcatcctgcacatcgctcccgaagtgtgcctgatgcgcaaactgcgcaaacattacgacggtcacccgggcctgtacctcaccgccgacctcgaaagtccgctggccgacctacatttcgacgtgcagcacattcccctcgaggacgattttacggacgtggtgatctgtaatcacatcctggaacatgtcgaagacgatcggcaggcgctgcgcgaactccaccgtatcctgaaacccggcggctggggcatcgtcctgtcgccgatggattcgtcgcgcgaagagaccttcgaagacgacacgatcaccgaccctgcagaacggacccacgtcttcggccagtacgatcaccggcgcatctacggccgcgactacgccgaccggctgcgcagtgccggattcgaagtcgccgacatcgacttcgcagcctcgctcaccgaagccgagcgccgtctgtacgccctgcccgacgaccatatttacgtcgtttacaaagtccgggaataaaacctcactcctatcacaaagcgagcggacgataaccacagtacagcaagcaaccgaacttgttttccgaaataaaaaatccccggcctcgcggtcggggattttttcatctatgcgatcaaggattacttctcctccttggcagccgcttccatcgcgtccttgagttcggccagaccggcgatgtcgcccagcgtggtcttctcgaccgaagcgttgatcttcttcaccgaagacttggtagcctcggcagaagcctttctttcggcagcctgctcggcgcgctcggcacgtttagcctcttcgaaaagacgagtgtgcgaaagcgtgatgcgcttggtagccttcgagaattcgatcaccttgaacggcagtttctcgccgaccgtcgccgtcgtgccgtcctctttcaccagctgacgcatcggagcgaagccctcgacgttctcgcccagcgatacgatggcacccttgtcggtcatctcggtaatcgtaccttcgtgtacgctatcgacagagaactgaccctcgaactcgttccagggattctcctcgagctgtttgtggcccagcgacagacggcggttctccttatcgacctccagcactacgacctcgatctcggcgcctaccgacgtaaattcgcccggatgcttgatcttcttggtccagctcaggtcggaaatatggatcaggccgtcgataccctcctcgatctcgacgaacacgccgaaattggtgaagttgcgaaccttagccttgcatttcgttcctacgggatagcgggtctcgatatcggcccagggatcgggagtaagctgcttgatgcccagcgacatcttgcgctcgttacggtcgagggtcaggatgactgcctctacctcgtcgcccaccttcatgaaatcctgtgccgaacgcaggtgctggctccaggacatctccgatacgtggatcagaccctcgacacccggtgcgatctcgacgaacgcgccgtagtcggccatcacgacaaccttgcccttcacgtggtcgcccaccttcaggttgggatccagcgcctcccaggggtgcggagcgagctgcttcagacccaatgcgatacgcttcttggcatcgtcgaagtcgaggataaccacgcggatcttctcgtcgagcgaaacgatctcttcggggtggttgacgcggccccaagacaggtcggtgatgtggatcagaccgtccacgccgcccagatcgacgaacacgccgtacgaagtgatgttcttgaccgtaccctcgaggatctggcccttctcgagcttcgacatgattacctgcttctgcgcctcgagctcggcctcgatcagcgccttgtgcgaaacgacgacgttacggaactcctggttgatcttcacaaccttgaactccatcgtcttatctacatatacatcgtagtcgcggatcggcttcacgtcgatctgcgaacccggcaggaaggcctcgatgccgaatacatcgacgatcataccgcccttggtgcggcacttgatgtaacccttgatgatttcgtccttctcgagggcctcgttcacacgatcccacgacttgagctgacgcgctttcttgtgcgaaagagccagctgaccgttcttatcctcggcagactcgacgtaaacctcgatcttgtcgccgaccttcagatccgggttgtaacggaactccgaaatggggatgataccctcgctcttgtagccgatattgacgaccacttcgcgcttgttgataccgatgaccgtaccttcggtcacctcgtttgcggcgatgttcgaaagagtcttgtcataagcctcgccgatctgctctttgggctggtcgtaaacgcccaggtcgttttcaaacgcgttccagtcaaagttctcgtttgcaactttttttgcttcttccatgtggaaattaaatgcgatgcaatcgctcgttaaatggttaataataaaacactcccctcgcgcatcgtgcgcatacggggagtgcaaagataggaagaaatcggcaatctgcaaactttcgaccttttttacgcagaaaatcaatgcgtatggacgggcagcggagccgaaggtacggccgggccgcgataggagcggatcaccagccccacgccgaagaagataaccaacgcgcagagcgccgtatccagatgcaggcggtcgaggcccatcgccaccgacaggacgacggccagaacgggttgcaggtaggtatagatgctcgaaacggtcggctgtacgtatttgagcgaatagttcagcaacaggttcgggacatacgtcggcacgaagaccacgaacaacgtcgccagcaggatgtcggtatccatcgccgcgaaatcggtatgcaccaactcccgggcaccgaacggaagtaccatcagcgccgccagacaatagacccagcgcaacatggtgacgacatcgtacctggcgatcaactttttgaaccagaccatgtagcaggaagtagccagggcgcagcccgcgatcatcaggttgccgactagtccggagtgcgtatgtccgccgctggctcccagcaggacgacacccaccgcacctgccatgcccaacaccagaccggcgatcttgaggcgcgtgaatttatcgataccgagcaccacggaaataagcagtaccagcagcggcgtgatcgtgtcgatgatcgatccgtcgatgggcgacgtgcgggacaaaccgtacatgagcagcaccttgcggattacgccgatcagcagggccgcaccgatcatcgttttgatgtccttgcgggcgatcggccgggccttgctccaaagcaaaggaacgagcgagaaaagtgccgccgcgcaaagcgaagcggtaaccagcgcgatcggggccacgtacttcgacagcacgaggttgtaaaagggatagtcgcatgcccagatgatgttgcacaacagcaacgccaaatgggacttcaccaaaagattcaacggagtcgcttgcaccatacgctaaagaagctgccgcctgcggatccggcaacctgccgaaccgtcgcggtttccctgcattccgggcaaataccgtgcaagacacaaccgacaagccggacacttgcgccgaaacgcctcggaaaatccgaccgtttcggccgacccccagctccccgccgccaacaaaatgccggagcccgaccgcaccggcgcataatacccgactcaccgatccccgtccttcgatgaaaggaccggatcaatcgtcgtcacgatcgtcgtggttctcccggtcatcgtgccgacctgcgaccgactgccggagcgtattgtcgggtgcgaggggtttgccgccgttggcgacgtattccatcaatacgtcgggcacgagccactgcgtagtctcgccgttcgtatattcgagtccctggtaattcttgaaaacatagtcgcccatcgccaccttgtatttacggccggacaccaacccgggaaagatcacctcgaccgcatcgtacccgtcggtacggatcacgtacggtgcggtcgagaagaggtcgatccgatgcgactcgcccttattgaccgtgtcgttgtatttggtcagcaccattttgctcatctgttcgggcgtcatctccatcacgctgaccgaagaaatgaaaggatccaggtcatatatgtcgctccgtgtcaggtcgcctttcgaaaggctgtcgcggcgaatccccccgtagtggtaaaaagccacgtcgctgcccgacttgcgtttgagcgcctggaggaagatgttggccacccccaccttgtcggccgtagcggtcagctctccagccttctccttcaacaccggattgttgcggtaggtctcgaccatctcctgataaaccgggtcgggcgcgtagtcggccagcggaaccagccggaacgacagggaccggatctccttgcctcgcagtcgcacctcggtaacccccaccatgttcaggttgcggcccgtctgcgtgatgagcacgccgtcctccacctcgttgatccgctcgtggctgtgtccgccgataatcaggtcgtattccgaggcttcgtcggccagttcccggtcgtatttcgaaccgatgtgcgtcagcgccaccagcacctgacaactgtcgcgcaggtattcgtactcctcgagcgtctgcacggcatccgtaaaacgcaacccctcgaagatggcgtcgtggccgtccggatggttgttgtacccgtaattggtcaccgcagcgacgaaagcgaacttctccccttcgcgatcgagaatgacatagggtttcaactgcggaatcggcgagttctcgctgaccatgttggcgcagatcaccgggaaacggcaataaccgatcgcttcggccaacgtctgctgccccacgtcgaactcgtggttgccgagcgtggccacgtcgtaccccagctcgttcatcagctccaacacgggacgccgcccctcggcctgatctacataggcattgcccgtccagcggtcgccggcatcgaccaggatcaccgacgccgtgtcccgacactcggcaacggccgtcgccaactgcggaaaattctggatttgggcatgtatatcgttcgttgataatatgataactactttttcacgaggtgcgcacgcacacaacgccgcacacagcaacagcgaaatacccaagaagatttttttcatcacaaatagagtttacgtttgtcaaagttaggaaataattgtatttttacgcgatttatgaacaaaaatatgtcagacacccttccggtcatctgcgaaaacgcaggacggacgatcgaggtcgcgatgggaacgaccctgctcgaagtcgaacggcagctccggctcgacgggccgcatccgttcctggccgcctatgtcaataaccgcatcaaggaactcaactacagaatatacaagccggtaacggtccggttcatcgacatcacctccttcgaaggaatccgggtatatcagcgcacgatctcgttcatcctgcaaaaggcggtccgggagctgtttcccgaccgcacgctctacatccggcactcgctgggggcaagcggtttctactgcgaaatatcgggcttcggaccgattcccgccgaacacctcgacgcgatcaaggcccgcatgcgagggatcatcgaccgcaacctgccgatccagggggtgaagatgctcaccgacacggcccgcaaaatctacgaagggttcggaatgaccgataaaatcgccctgctcgactcccgaccgaggttatacagcaaaatttatacgatcgactccctgccgggttatttctacggagccctgaccccttcgacgggttacactccgcagttcgacctgcactcctattacaacggcttcttcatcgccctgccgctgcggaccgacccgacgcgactgcatcagagtgtccaccaggagaagatgttcgacgtcttccaccaataccagtcgtgggtggagatcatgggcgttccgaccgtcggacagctcaactcgaaagttctcgcgggcgacgccagcgagctgatcaagatcgcagaggcgttccacgaaaacaagctggcccaggtggccggctgcgtcgcggaggccaaccgcgaacggggcgtgcggctggtgttgatttcaggcccttcgtccagcggcaagaccaccttcgccaagcggctgggcgtacagctccgggtcctgggactcaacccggtactgatctcgctggacgactatttcgtggaccgcgaaaagacgccccgcgacgaaaacggagagtacgactacgaggcactcgaagcgatcgacctcgaacagttcaacgaccatctgaaacgcctcgaacggggcgagagcgtcgatattccgcgttacgacttcatctccggcacccgccagtggcacgacaaccccttgcagctcgacgagcggtcggtactgatcgtcgaaggcatccacggactgaacccggccctgacgcccggcgttcccgaatcccggaaattcaagatctacgtttcctgcttcacctcggtcgccctcgacaacgtgtcgcgcatcgccacctccgacaaccggctgctgcgccgcctgacgcgcgactaccgcacgcggggcaacgacgccctttcgacgctcgcccgctgggaaagcgtccgccggggcgaggaaaagcacattttcccctaccaggagaatgccgacgtgatgttcaactcgtcgctcttctacgaaatctcggtcctgcgccgcttcgccgaaccgatcctgcgggaagtccccgacacggttcccgaatacggcgaggccaaacgcatgctcaagttcctcgacaacttcatcccgatctctcccgaagagatcccgcccacgtcgctcctgcgggagttcatcggaggcagcagtttcaaatattgatcccgaacgaataaattcgaattacaaatcataaaaaatcattctcaaaatcctatgtttgataaattttccgaccgccatatcggcgtcaccaatcccgaggatttgaaagcgatgctcgccgtgatcggcgtcaaatccgtcgatgagctcatcgcacaggtcattcctcagtctatccgcctgaaacagccgctcgccctgccccagggcatgagcgaatacgaattcgcgaatcacatccaggccctcgcagccaagaatcgcaccctgcgttcgttcatcggcatgggttactacccctgcgccgtaccggccgccatcacgcgcaacgtcttcgagaaccccgcttggtacacttcgtacactccctatcaggccgagatttcgcagggacgcctcgaggcgctgctgaacttccagaccgccgtcatttcgctgacaggcatggagatcggcaactgttcgctgttggacgaaggcaccgcagccgccgaagcgatgctgatgatgttctcgctccgctcgcgcgaagcggtcaaggagggacgcaaccagcttttcgtcgatcgcaacatcttcccccagacgctcgacgtactgatcacccgcagcgagccattcggcatcgaactggtgatcgacgactacaatacatatgaattcaccggcaaggagttcggcgccatcgtacagtaccccgccgccaacggcgaggtgcgcgactacgccgccttcaccgaagcggcccatgccaaaggcgccctggtaacggctgttgccgacctgctgtcgctggccctgctgaaggctccgggcgaatggggggccgacatcgtcgtcggcacgacgcagcgtctgggtattccgatgggcttcggcggcccgagcgccggctacatgaccacgcgcgaagcgtacaagcgcaacatgccgggccgcatcatcggcgtatcgatcgaccgtctgggcaaccgtgcgctccgcatggcgctccagacccgcgaacagcacatcaagcgcgagcgtgccacctcgaacatctgcaccgctacggcgctgatggcttcgatggtcggcttctactgcgtctataacggcgccgaaggtctgcgccgctcggccaagacggcccacacggcagccgtaacggtagccaaggcgctcgaagcgatggactacaaactggcggccaagaacttcttcgacacgctcgaagtagaggcggaagccgccgtcgtacagtcgctggcgctcgaacgcggcatcaacttcttctatccttcggaggatcgggttcgtttctcgttcgacgacgtgaccacccccgaggaggtgaacgaggtaatcgccatcttcgccgaggccaaaggcaaaaaagccaaggccgtcaaactgtcggaggagattaccatcccggccgcgatcctgcgccagtcggagttcctgaccgaacgcgtcttcaatacctaccgctgcgaaagcgacctgatgcgttacatcaaacgcctcgagctgcgcgacatctcgctggcaaattcgatgatctcgctcggctcctgcaccatgaaactcaacgccgcagccctcatgcagcccctgtcgctcgccgggttccagaacatgcacccgttcgctcccgccgaccagaccgaaggctaccgcgaactgatcgacgggctggccgccgacctggcgaccatcaccggcttcgccgcctgctcgctgatgcccaattcgggtgccgcaggcgaatacacgggattgatggtgatccgcgcctaccaccagagccggggccagggctaccgcaacatcgtcctgatcccctcgtcggcacacggtaccaaccccgcttcggcagcgatggccggcatgaagatcgtcacggtaggctgcgacgccaacggcaatatcgacgtggaggacctgaaggccaaagcccaggagcacagctcggagctggcctgcatgatgatcacctacccctcgacgcacggcgtattcgagagccgcatccgcgaaatcgtggatgccgtacacgacgccggcggacaggtatatatggacggtgccaacatgaacgcccaggtaggcctcacgaaccccggctacatcggtgcggacgtctgccacctgaacctgcacaagaccttcgcaatgcctcacggcggcggcggcccgggcgtaggtccgatctgcgtggcggagcacctccgcaagttcctcccctcgcattcgatcgtccccaccggcggcgacgaaggcatcacggccgtggcatcggcaccctggggttcggccatgctcttcccgatcacctacggttacatcaagatgctgggcggcgaaggtctgaaagcggctaccgagatggcgatcgtgaacgccaactacatgtcgtcggccctcaaatcggagtaccgcacctactattcgggtgaaacgggccgcgtgggtcacgagatgattctcgacctgacccacttcaagaaagactacaacatcgactgcggcgacatcgcccatcgtctgatggactacggcttccacgccccgacgctctccttcccggtacacgaaaccctgatggtcgagcctacggagtcggagccgaaggccgaaatggaccgcttcatcgccacgctcatccagatcaagcgcgaatgcgaggaggccgccgcttcgggcgaagcggacaacgtagtggtgaacgctccccacacggctgccgaaatctgcggcgaatggtcgcatccctacacgcgcgaaaaggcagcgttcccgctcgacttcatccgcgagtcgaaattcttcccctacgtatcgaagatcgacaacggctacggcgaccgcaatctggtctgccgctgcacggaataaaccgggactctgcatgaaaaaggagggacgcggactgcgcccctcctttttatttcaccccgaaggattcgagcctaaaaactcaacccggcacgcaggacgatacctcccagaccgctcgaagtgtcgggagcagtctgctgctgcacctggaatccgaagtcgatgttcagtgccaggacactccccaaaccgaatttcacaccgacggccggcgcagcataaataccgccgtgcttgtggatgccgtaaccgatatccactttcagatagggggaaatccgccggtcgaggaaataaaccttcatatcggcgaaaatcgggacgaacgaacggcctccgtcggtgtactccctgaaactatcgtccggcatatctccccgggcggaatagtagttccaggccacacccaggccgacgaacagtcgcgggccgatgcgcacgccgtggacggtttccaggacgaaacggtcgtaggcgttcgatcctactccgaaagcggtccccacaccgacctctccctgataacgaatcccctgcccgctctgcgcgaatactgcggggaagcaccacagcgccatgatccatgcgaagaataattttttcatcgttttcgcgttaataatacaatgtataaatccgtttatttcatcccgattgcaaaatccgggcgaaaatcgtatctttgtcacaattacactcaaataattttctgaaaacaatgaaagtagaaaaaaacaaaatggtagcggtcgattacaaactgaccgttgacggcgcaatcgcagaccagtcccagccgggcgctcccctcgagttcatctgcggaacaggcatgctgctccccaaattcgaggaggcgatcctgggcaaagagccgggcgagaaggttgccttcacgctctctccgaaggacggttacggcgaggtgatcgccgaagcgatcgtcgatctgcctaaaaatacattcatggtggacggcaagctggccgaagacatcctcttcgcaggttcgcaggtgccgatgagcgatgcacagggcaaccgcatgatcggtaccatcaaggaggtgggcgaagagaccgtgaaaatggacttcaaccatccgatggccggcaagaccctcaatttcgaggtcgaggtcgtttcggtacgcgacgtaacgcccgaagacctgcaatcggcaggcggctgcagctgcggttgcgacggcggctgcggcgatcatgagggaggttgcagcgaccacaagggaggctgcggcgagggctgctgccactaatccgacaccggaaaagcgttcccgtacgcttttcttcaatcctgcaagtggagagccttcggttttccacttgtttttatcttcccttcatcctgttatccatgctccattcgatccgccaattcatcgaggctcttcaagatccctatgggctgacccgcacgctgggagaaatcgaagtgtgccgttcttcggacggcgaacccctgcgctgggtcggcaacagcgcggtggttttcaaaatccgctgcggcagccggtacaaaatgctcaaatgctacacacggcctatggagcacctcgaagcgatctatcaagagaaactcctgcggcaagagctttacgtttggcaggccgacgggcagggcgagtggtgcgacgtggtcgtggacgactggatcgaaggaatcacgctctacgaagccgttatgcggggcgccggctccggcgacaaagcgcacctcagcaacttggcccgacagttcgaccgcctggcgctggaacttctcgaaagcgactgggcgcacggggacctgaaacccgaaaatattctgctggatgagagcggcacgctccgtccggtggatttcgatgcgatgtttcttcccgtcttcgccggagagaaaagtcccgaactgggcacggcagcctaccagcaccccggacgcacggcggaggatttcgacgcgtcgatcgacgactactccatcgccacgatctccacgaccctgcacgcgctggcgctcgaacccggactgctcgcccgctacaaccggggagagggactgctgctctcgccccgggaaatcgtccggcacggctgtgcggcccacgcagaatgcctcgcactgttcgaaaaggcgggcgacgccgtccgctatcgcatcgcccggttgctcgaatccccgctgatgcgcctgccgaacttgaagccgctcgtccgatacgccgtttgcgggcccgaaactccggccgaccggggcgaactcttcgtccgggacggactgtggggtttcaaaatcagagaacgggaattgatcccacccatatacgacgccggtttcgacttctccgaaggcttggccgccgtccgcacggaacgctgctggcatttcatcgaccccaccggtgccgtagcgatcgactgttcggactgcaacgcggtaaaaccgttcgcaaacggccgggcgatcgtcgtccgcgacggacaacgtctggccatcggccgcaaggaaccccgaaccaccttgcatatttgacggcgaacaactatctttatccgaagaatacctgttccgacagggttgtttcgcggcaatccgaaaaataaattttcgattgcccgtcgctttgactatctttgcaaaagatagaaggcgactcggacaagttcggacaaccgacggtcgaagcgaagcagagggcactcgtgaactctgccacgcaaaaaaagaaactaaaagggatgtttggcttgccgtccacctttcgctatctttgacatagttttagataggatgcgcctcggaaaaccgggaataagttcccgttttctctcggctttcgctatctttgcagaagatcggaggcagttcggcaatctttgcgtgcaagcccgcacgattgccctcacctttcacgatctttgtcttcaatatttcgaatcgcaacgacgacatgacggaatacagaaaaccgacaccggccgaaatcgaggcgctcacggccgccggaaacagcgcggaaaattgggatgccatcgaagtcgcacaaaacttcaccccggcccaactttcgggctgtcggctcgaaggacgcgtacagatcgggcggggagcacggctgcgccgctgcaccatacgcaactaccgcatcggcgaagaggcgctgatcgaaggggttacggcgctcgaatgccgccgcgaatcctcgttcggcaacggagtccgggtcgccgccatcaacgagaacggcggacgtaccgtacggatctacgaccgactcaccgcccagaccgcctacatcctggccgtctatcgctatcgccccgaggctgtcgaagccatcgaacgaatgatcgaacgctacgccgcagaacgccgcgacaccctcggtaccgtcggtccgcacgcacgcatcaccggcgcccgtttcatccgggaggtcaatatcgggaaaggagcgacgatcgacggagcatccctgttggaaaacggcacggtctgcgccggagcttatgtcggcatcgacgtccaggcccgcgatttcatcgccgcagaaggagcccgcattgacggcggcacgcttctcgaacgctgcttcgccggcgaatgctgcacgctggacaaacacttcacggccgtcgattcgctctttttcgccaacagccactgcgaaaacggagaggccgtttcgatcttcgcgggtccctacaccgtttcgcaccacaaatcctcgctgctgatcgccggaatgttctcgttcttcaacgccggcagcggcgccaaccagagcaaccacctcttcaagagcggcgcagtgcaccagtccgtccacctgcggggctgcaaattcggcagcggcacctacatcatggctccggccatcgaaggaccctttacgctggtcctgggccgccatacgcagcatcacgacacctcggcgtttccgttctcctacctggtggaacaggacggacgttcggcgctgatgccgggcgccaacctcaccagctacggcaccgtgcgcgacatcgggaaatggcccgaacgcgaccggcgcaccgtcaaacgcgaccggatcaacttcgaggaggacaacccctatctggccggaggaatgatcgatgcggtcaataccctcaactcgctggcggaagcgcaccccgacgcggagagttatgtccacaaccacgccctgatccgctccacgcagctgcaaaggggcctgaagctctacaataaggcgatcgtcgcctcgctcggcgcaatgctccgaaacggcgaaccgggtcgtgcggacggcacgggccgctggaacgatgtggcggggcaatacgttccccgccgggaggtgaaacgcatcctcgacgccattgcgaacggcggcatcgattcgctggaaggcatcgaccgggcattcggccggatagccgccgactacgaccattacgcccgcagttgggcggaaggggtgctcgtgcaactgctcggacacgctccctccccagaagagatcgcagaagccgtgacagccggagagcgaacccgcgaaacactccataaatccgccgaagacgaccgggcccgcgactgctcgcccgccatggccgtcggatacggcgtggatgccgattcggaggaggagaaaatgcaggactaccacaccgtaagaggaatccgataatgtacacccaaagtatcacgcggagccaccgcacagccttcatcctggccatcgaccaatccggctcgatggcggagaaactcctgttccggggacgacagaccaccaaggccgaagccgtcgccgaagtcaccaaccggctgctgttcgaactcatcgaacgggcccggcgcagcgacgaggtgcgcgactactacgacatcgcggtattgggctattcgggcgacggaatcgtatcgctgctgaacgatccggagccgctggttccggtatcgcggctggccgctctgcccgtcgatttcgcagaaacggtcgtggagcgccgcatgccggacggcgaagccaccttccgcaagatttcgatgccggcctggatcgctccgaaagcggtcggacagacacccatgtacgaagcgctgctgcaaatccgcgacctgacacaagcgtggtgcacgaatccggcccacagcgaaagttttccgcccaccgtcttcaacatcaccgacggggaagcctcggactgcgaccagcgcgaacagctcgcgatctgcgaaaagatccgcaccatcggaaccaccgacggcaaggtgctcctgatcaacatccatatcgccaccacgtccgactcacgttcgctgctctttccgaccgaagaggagattcccgccgacaaccgctacgcaagactgctgcacgactgttcgagtccgatgcccgaagagctttcagaggcgatccgacaggtgcggggcgatctggccaaaccacccttccggggaatgagttacaacacgtcgatcgccgaactcatcgccatcctcaacatcggctcgatcagcatcaaaatacagtaaaaagatgaccgttcccaccctttataacttcaccgaagcgctccaggctcccgatctggccttttcgacgctccgcgactgccatccccgccggacggcgacgggaggagtagccctgtcgcgcaccagtcgcttcgccgaagcggaaatcgaatggcagagccggaaatacctgctctgcttcccgctctcgacagcctcgatcttcgccgtcgaacagacagcggcccggcttcggtacctccggacaccgttgcttaccgaatacacgatcctgcgcgacgaaatgacctacacggacgacaccgggacgacccgcacctgcgatgtggtgctgcatcggctgcccgaagggcgccccctttcggtctgcgccgcagagttcgatgccgaatccctgcggtcggcgctcgataaactggaggcgggactgtccgagctgggcttcagccacaacaatctcaaacccggcaacctctacgtcacctccgacggacgactgattcccgtccggtaccatttcgcccgtttcggcgaaggacacgacgccgaaggattcgaacgtctgcgtcagttcgtgcgcgaacagggcggcaaggggcaaatgctttgcgacgcggaaccgtcccgctacaccacgctgcccgaatttccgggacatctgttcgtgggcgagatgtccgatcaactggttcgtgtggaagacgaaaccggctacgggttcgtcgataccgaaaaccgaccggttatcgcgccgcaattcgtctgggccgccgacttccgcgaaggacgcgccgaagtccagaccgcacagggcatgggcctgatcgacaaacggggacactacgtgatcgaaccccgctacgaaatcgtcgattacaacccctacacgggctgttctcgcattcggagcgaagggctctgggcgcttgccgactacaacggacgcatcgtcggcggattcacaccgcgctacatcgaagaaaacgaatacgtcgaagcttaataacttaacaaaaaatactctatggaaaacgtaaaatgtctgatcatcggcagcggcccttcgggctatacggctgcgatctacacctcccgggcgaacctctcgccggtactctacgaagggatcgagccgggcggacagctcaccaccaccaccgaaatcgaaaacttccccggtttcaccgaaggcatcgacggccccaaactcatggataacatgcgccggcaggccttgcgcttcggggcggatatccgcccgggcgtcattaccagcgtcgatctctcctcgcgcccgttccacgtcatcgtgaacggagagaaggagatccaagccgaagccctgatcatttcgaccggcgccgcagccaaatacctgggactgccctccgaagagaaattcaagggcatgggcgtcagcgcctgcgccacctgcgacggattcttctaccgcaagaaggacgtagcggtcgtcggaggcggcgatacggcatgcgaggaggccacctacctggcttcgatctgccgccaggtatatctgatcgtccgcaagccctacctgcgggcttcgaaagccatgcaggagcgggtaatgaacaccccgaacatcaaagtcctcttcgagcacaacacggccgaagtattgggcgatgaaaccggcgtaacaggcgccctgctgcgcgacaacaaaggcacggaaaccaaaatcgacatcgctggcttcttcgtggcgatcgggcaccatcccaacacggagattttcgcagaccaactggaactcgacgccgaaggttatatcaaaaccgtagcgggcagctcccgcaccagcgtcgaaggcgttttcgccgccggtgacgtgcaggatccccactatcgccaagcgattacggccgccggctcgggctgtatggccgctctcgactgcgaacgtttcctgctgcagtaatttctattcaagaaagggaacgagtgcgcacaagccgttccctttcttcatccccgacagccggacggtttccgaccgttcgaaacccggtcttgcaaaaccggcaggcggagaacacggaaaccctcgaactccttccaattcctgcagcatgggtttcgacgcggctgtcacccttttcggaaaggacgaagaagaacggaaggtatccattccctgcaaccctttttgattttaggggtgcagattttgacatgacgacggacgacacggaagggacatacttcaagtatctccctttcggggaggacgaggaagggcgaaagatgccccataaaatcgaaaaaagatgagtttcagcgtaaccatattaggctcggcttcggccaaacctacgcccgaccgacatccgtcggcgcagatcgtcaaggtacacgaacagcactacctggtcgatgccggcgagggcgcacaacagcaaatgttccgctacggaatcaatccgctgaaactgcgggcggtattcatctcccatctgcacggcgaccatgtcttcggactctttccgctgatctcgacgctggggctctacggacgccgcacgccgctcaagattttcggtcccgcgccgctgggcgaaatgctcggatgccacctgcgctacttcgacacgcaactaccctacgaaatcgaatgggtggaagtcgatacgacccggcacgccctactgttcgaaaaccgcacgctcgaggtgtggagcgttcccctgcgtcaccgcatccccacctccggctacctgttccgggagaaacagcccccgctgaacgtccgcaaggagaaaatcacggaatacggactctcgatcgcccggatcacggccgccaagcgaggcgaagatattctgctcgacaacggagacacgctccccaatgcggaactgacctaccgaccttacgcgccacgttcatatgcttatctctcggatacgagctggtcgcccaaagcggcaaaactcgtcgagggggccgatctgctctaccacgaaacgacctacgcccacgccgagcacaagatcgcccgcgagcggggtcactccactacggtcgaagcggcccgcatcgccctcaaagccggcgccggacggctcgtaatcggacactactcgtcccgctacaaggaagagagcgttctggtcgaagaggcccgcacggtatttcccgatacccacccggccaccgaaggcacaacattcacgatcgaaaaacggcagcaaccatgaccaaagccgaaatacaactcgtccgctcgctggccgacaaacgcagccgcaccgaacacgggctgttcgtagccgaaggacacaagttcatcggggagctgtgcacctccgccctgcgcgtccgcaagatattcgccctggaagggcttttcgagggcggcgaagtcgaaaccgtgtcttcgcgtgaaatggagcggctctcgctgctgaagaccccgtcggattcgctggcgctggtcgaaatcccgcatcatcctttccggcccgatacggcacaacgggagctggtgctggcgctcgaccaggtgcagaacccgggcaacctgggcacaatcatccgcttggcggactggttcggcatccccgagatcgtctgttccccaacgaccgccgactgctacaacccgaaggtcgtgcaggcgaccatgggggccatcctgcgggtcaaagtccactacacggccctcgaaccgtacctggcacaggctcgggagcggaatattcccgtttacgggactttcctcgagggggaaaacatctactcgacaccccttacgccgggcgggatcgtcctgatgggcaacgaaggccaagggatcgctccggccgccgcacgacacgtatcgcacaaactgttcatcccgccctatcccgccgaccgcaacggttcggaatcgctcaacgtagcgatcgccacggccgtcgtctgcgccgaattccgccggcaggcgagcgcaaagagataagacaagtccgaaagacgagagagaaccggaccggagagtcggcattcagccggcaaatccccgtccggtgcattttttagtttagcgacttttatctcctcggcgaacgatttcgggaaaaacgggaagtaattacgtcaaacacagacggttctacggcataagcccgacgccgggcgaacatatatcggaaaacagacaactgacagccgaaaaagaacggcagcgatacggaggaccggaatacctatcggaatttctccctcccccaagcgctccgtttcttagccgggcgcacattccgccattcttaaaaaacgccccacaccggccagcgacagaatatacactcctgtttccgagcgactaaaaaaccctctccgcaggatcgggagagggttcggaaccaacgcagaccgaaatcactccgcatacggcgatgcccagaaccatttgtcgttggtcgtcatgaaatgatactcccggtcgcaatcatagccctccggaatcagcgcaacataatagatcggatgcttgccttcgcaccaggtttcggtgtcgaactcgctccggtcggagcataccaggtaatagaggttcttggccatataggtatcgagataatgtttctgcgtctggggcgactcgttgttccagttggcatcctcgttcaggaaatagggacgcccgtcgcgcatccgctcccgaacctcctggatcgaaagcatcaccccgttctcatcgaccacgtaggcatcgaacgtgggatcgacccaaacccacttgtcgagcgtcgcggaatagacgacattaataacgtgacagtcattgaccatcttccggggcatgcaggtcacgaagcgcgacttgaaacccatcgccagatagcactcgttgagcacctgagccatcatacggcagttgattccccggttctccttgcggcacacctcgatcagatcgatcgcgttgcgagaggtcggattgcgggaactgccgtcgtgacgtaccgcattgtgcacccagtgcatcaggttccggatcttcgacagttcgtcgccgctgccggcaatactgtccaagttgaaatactcccgcacccgcaccagatcgcggtcgttgggatcggcatagcggaaccggggaagagaatccgtcggcgcagaggaatcgtaaggccccgcctgccgcaagatccacatgaaatcgccctgctcacgagctttttctacagtctccgcatatcccctctcggagcggatattgtccagatcgggatcttcgatcatccaggagtaatcgcagttcccgcaatcgacataggccgcaaggctcgccacagccgccctgcgtttgttcagtcgggactgtgcacaagccaggttgtaatattcgcctctcaaatagccgccgtaattccactcgtcgagctgcgtccggacactatcgggcaatgtctcgaaaaggcggatcgcctcccggtactcacgctccgcttccgcatacctcttcgcttccatcgcccgattcccacgctcgcaacaggaatggaccggagctaacaactcttcaaaactctgggccggcgaagcggttatgcagaatgccgcaaccaccgataaaagcaactttttcatacacttccaatttaatgggttcaaaactttccgaaagatagaaaaaattcccccccccataattttcggcaaaaaaatttacatccggtcataatttcggcgcaaaatccgcgaactccgaaaaaatatcctatatttgtagattgaaacagagcgttttcgcccggcaaacaacgaaaagacggattccatcgtcggatcgcgtgcgcgaaaacggaacaaagaattttatttatgtcggaaaacagactcaaaataggcatcacgcagggtgatccgaacggcatcggctgggaagtcattctcaagactttcgccgatccgcgtatgacggaactctgcacgcccgtcatctacggatccctgaaagcggcggaattttaccagaaaaccatcgccgatctggaacccgtccccttccatatcgcctcttcgatacacgagatacgccggggcaagatcaacctgattctctgcggcgacgaaacgaagatcgagccgggtacggcctcgccggaggcgggccgggcggcagccgaggcgctccacgccgccgtgcgcgacctgcgggacgaacagctcgatgcactggtcacggctccgatcgacaaggagtcgatccagtcggacgacttccgctatacgggacacaccgaatttctggcggccgagctgggcggcgaacccctgatgatgatgtgcagcgacctgctccgcatgggattggtcacgatccacatcccggtcaccgagatcagccacgacctgacccggcagaagatcgtcacacggctcgaacagctgcgttcgtcgctcaaggcggatttcggcatcgtcgaaccccgtatcgcggtgctggcactcaatcctcacgcgggcgacggcggtctgctcggttcggaagaggaacacatcatccgaccggcagtcaatgaggcttacgaaaaaggcatactcgctttcggccccttcgctgccgacggattcttcgccagcggccactaccgggattacgacgcagtactagccatgtatcacgatcagggactcacgccgttcaagaccctctcgcccgacggggtgaatttcacggcctgcctgggctgcgtgcggacatcgcccgatcacggcgtggcgttcgacatcgccggacaggacaaggccgacccgcaatcgatgcgcaacgccatctacctggccacggacatcgtgaacaaccgccgcgcctgggccgaatggacgagcaacccgctgccgcacgccgagcgcgaacggggcggaagggacttgtccgtgaaggacctgcccgatacggagaaagagagttaaaccggctgaacgcggctccgaaaaccgaacggatagtcggccccgtaaatcggacggcacgcactctcccgacggtcccggccgattcaaggcatagtgtcatacggcaacggagccgatccggacaagaaaccgcttcccggcacgttccttgtcacaagcataagcgacaatccggccctatccgcctgcgcggacaagcccgccggaaagccgcaggcaaaacagtaaaaccgggcgaaccggaggtgtattccgtctcgtaattgtggaagcgccgaaggccccaaaacaataatttacaaatgattaaaatcacctttcccgacggcaacgtcaaagagttcgccaaagggactacggcttaccagatcgccgagagtatcagccctcgtttagctgccgactccctggccgcatcggtaaacggcgcgaccgtcgatctcaaccgcgccatcgaagaggacgcttcgatcaaattctacaagtgggacgaccccgaaggcaagcacgctttctggcacacctcgtcgcacctgctggccgaggcgctcgaagccctctatccgggcatcaagttcggcatcggcccggcgatcgagaacggattctactacgacgtggactcacccgtgcccatcaccgaagccgatctggaaaccatcgagaagaagatgatcgaactttcgcgcaacaaggagcaactcatccgcacggaagtatcgaaagccgacgcgctgaagaatttcaccgaaaagggcgatccttacaaagtggagctgatccgcgacctggaagacggcacgatctcgttctacaccaacggcgcattcaccgacctctgccggggaccgcacctgcccaacacggggttgatcaaggccatcaagctcacctcggtcgccggagcctactggcgcggcaacgagaagaacaagatgctcacccgcatttacggcatctccttccccaagaagtcgatgctcgacgagtatctggcgatgatggaggaggccaagaaacgcgaccaccgcaagctgggcaaggagctggagcttttctgcttctcgcaacgcgtaggccaggggctacccctgtggcttcccaaaggcgctgccctgcgcgaccgcctggaacagttcctgcgcggcgtacagaaggagtacggctaccagcaggtcatcacgccccacatcggcaataaggaactgtacgtgacctccggccactacgccaaatacggcaaggactcgttccagccgatccacaccccgatcgagggcgaagagtatctgctcaagccgatgaactgcccccatcactgcgaaatctaccgctcgaagccccgctcctacaaggagctgccggtgcgcctggcggagttcggcacggtgtatcgctacgagcagtcgggcgagctgcacggcttgacccgtgtgcgcggcttcacgcaggacgacgcccacatgttcgtacgccccgaccaactgctcgaagagttcgaaaaagtgatcgacatcgtgctctatattttcaaaacgctcaagttcgacaactatacggcacagatttcgctgcgtgatcccaacaacaaggagaaatacatcggatcggacgaaaactgggagaaggccgaaagcgccatcatccaggccgccaaggagaaggggctcaacacggtcatcgaatacggcgaagccgccttttacggtcccaagctggatttcatggtccgcgatgccatcggccgcaagtggcagttgggtacgatccaggtagattacaacctgccggagcgtttcgatctgacatacaagggcgccgacgacaagatgcaccgcccgatcatgatccaccgggcgccgttcggctcgatggagcgtttcgtagccgtgctgctggagcacacgggcggcaaattcccgctgtggctctcgcccgaccaggtggtcgtgctgccgatttcggagaagttcaacgactacgccgagaaggtcagcgcctacctgaacaagtacgacatccgctcgcaggtagacgaccgcaacgagaagatcggccgcaagatccgcgacaacgagctcaagcgcatcccctacctgctgatcgtcggcgaaaaggaggaagccgaaggactggtatcggttcgtgcgcagggcgaaggcgacaagggacagatgaccctcgaagcgttccgcgactatatgaccgatctggtcagccacgagatcgacgccaacaaaatggagcaaaagaactaagtattaactaaatatttcaggaggacaaagctatagcaacaccacctcgtccattcccgccgcgaccatcgactcccgggaataacaattcacagaaaccgaggcttccaagacccggttttcaaccgaaaaaagcggataatccgcaccgtatcaacgacgagatcacggcaccccaggtgcgcgtggtcggcgacaacgtcgaacagcccgtcgtactcccgatccgcgacgcactcaagctcgcggacgagatggagctcgacctgatcgagatttcgcccaaagccgatccccccgtgtgccgcatcgccgattaccagaagttcctctaccagcaaaagaaaaaggcaaaggagctgaaggccaaccaagcgaaggtcacgatcaaggagattcgcttcggaccgcagaccgacgaccacgactacaacttcaagttgaagcacgccgagaacttcctcaaggagggttccaaggtcaaagcctacgtctttttccgcggtcgttcgatcgtgttcaaggagcagggagaaatcctgctgctgcgtttcgccaccgatctggaagagctcgccaaagtcgagtcgatgcccaaattggacggcaaaaagatgaacatgatcctcgcgccgaagtcgaaaaagtaacgacaggccgaggacaacacgggcgcaggccataaatacgacacaccccgagggagaaatcacattttcccttggggtgttatttgaatttacgacaccggatatttcccgaccgaaccgaaattggaattgggcatccggagcacaagccggggaattccgtttcgcacgattcgtagcaggcagagccgacaaccgggcagagaaggaggaagggggtggacaggcgattatccgttcgataaagagcgttatcgccaatcgcccacacttcggctaaattcgcccttgcaccgggacctattcgtatatttggctgcaccttaaatactccgcctcggcaaaatgcaaataaatttgcttttgcactcggcttaatcacaatctttgactgcgtcttagatactccgcctcggcaaaatgcaaataaatttgcttttgcactcggcttaatcgtatctttgcagaagatcgagggcgattcgacgatcttcgcgggcctgttcgcacgattgcgctcatccctcgaagataaaatacggttcggacaagttcaaacgaccgacgcccgaaacatacacagaagacatttgcaaactctgccatgcaaggaggaagagaaggagggaaacagaaagttaagtttgacttgtcgctcacctttcactatctttgtagaagataggatacgcctctgaaaactgtgagcaagctcccgttttcttttcggctttcactatctttgtagaagattaggatgcgattcgacaatctctgcgtgcaagcccgcacgattgctctcacctttcactatctttgactgcgcttttaatctttcacctgcacgatgacgacaaccgacaatatcttcgccctcgaaccgagaaatacatccgccttcgaacggaccacgctcgaaactttccggtttcaggccgaccggtgcgccgtgtaccgcgaatacctcgaccgcatcggagtcgtacccgcagaagtgacgcggattgaacagattccgttcctgccgatcgagctgttcaagcgacgcgaagtttatgccggcgaccggccccccgaaatcgtcttcacgtcgagcaacacgggcggcacgactccctcgcggcacttcatgcaatcgctggcccactatgaaaaggcgtttctcacggccttccggacgttttacggcgatccggccggatggagcctctacggattgctgcccaactatctccagcgcgaaggttcgtcgctggtctatatggccgaccgactgatcgcagcctgcggctcaggcggcttttacctcgacgactacgaaaaactgctcgcggacatggcccgcgatccgaagcccaaaatcctgctgggtgtcagctacgcactctgggacctcgcggagcgatacgccccgaaattcgaaaatacggtcgtgatggagaccggcggtatgaaagggcaccgggaggagcttccgaaggcccgattccaccgcatcctctgcgaagcgttcggcgtagaaagcatccactcggaatacggcatggccgaactgacctcgcaagcctactcttcgggcagcggcatcttccgcacaccgggctggatgcgggtgctcgtacgcgacgtgaacgatcccttcgacatccgcccggcaggtgtgcggggcgggatcgacatcatcgacctggccaaccgctactcctgcgccttcatccagacgcaggacatcggccgcgtcttcgacgacggcagtttcgaaatcgaaggacgtatcgaccgcagcgacatacgcggttgcaacctgctggtacagtaaacaccggggcttcggtatctacgcaaaaagggattcctcgcaaaaacaccccgaagagggcggcctgaaaatcccgcagtcacccgaagatcgaaaaaaacggaaacggacaagaacccgaataaaatttaattgccaaacagcaaaaatgaacgagatagatttcgtaatcctgtgggtggacggcaacgatcccgcctggcgcgaagagttcgtccgcacacgacaggcggagaacgacgatgcctcggagatccgttaccgcgactggcgcaatctgcactactggttccggagtgcggaacgtttcgctccctgggtgcggaaggtgcatttcattacctggggacacctgcctgcgtggttacggcgcgaccaccccaagctgcacatcgtgaatcaccgggatttcatcccggcggaatacctccccacattcaattcgaacaccatcgaactgaatatccaccgcatcgaagggttggccgaccggttcgtactcttcaacgacgacacgtttcttacgcgcggctgccggccggaggatttttttcgccggggtgtgccctgcgacatggcacgcctgagcgtcgtacaaccttcgtcggtcgggcatatcatctacaacgacctggagctgatcaaccgcctgcacgataaacgcacggctatccgcaaccacatcgcccggtggttctcgccgcgctacggtatcgtcagcctgctgaaaaccctcacgctgttaccctggggcttcttcccgggtttcaacgactcccacatgccccagccctacctcacggagcgctttcggcaagcctgggaacgctggccccgggagctggacgcctcctgccgccaccgaatccgctccttgagcgacctgtcgcactggctcgtccgttacgacatgctggcttcgggagctttcgcaccccgctcgatggccgactgccggttgatgaccctcacggacgactcgctcgaaagcatctgccgcgacatcgaacggcaacgctggcggatgatctgcctgaacgacagcgagcacatctccgacttcgaccgccaatgccagcgtctgtgcgaggctttcgagcggatactcccggaaaaatcgagctatgaaatctgatatttcggtcgtcattcctctctataacaaagagaaagagatcgcccgcaccctccgttcggtgctggcacaaacctcgcagcctcttgaaatcatcgtcgtggacgacggttcgaccgacggaagcgccgcccgggtcgaggagatcggctcgcccctcatccggctgatccggcaggagaaccggggcgtaagcgccgcccgcaaccgggccatgcaggaagcctgcggagagtacgccgccctgctggacggggacgatacgtgggaaccgggctatctggcagaaatcgaacgtctgatcgctgcctacccaaactgcggagcctacgcaacctctttcaacgtggatgacggacatcgcctgacaccgggcgacaccccgcaaacggagggtgtcgtggatttcttcaccgaagcgctctcccattacgtgctgatcccctcctcgactacgctccggcggaaaccggttctctcgctgggcggatttcccgaagggatgcgcatgggcgaagatcaatacctttggacgaaactcgcacgcaccagcccggtctgcttctccccggcccggctcgtgcgttactcgaaagccgcttccaaccgttcggcagccatctaccgcccggaacagacgcgattttccttcgaagacctatacgaacccgccgcccgcgattcgagcaacgaatacgtcgcccgcgcagcactgggcaaagccctcgtcgtcagcgccaaaggcggcacggcggaagccgcgcgggctgcgaaattcttcgcctacacccggcacgaccggcgtacgctgcgcaaactgcgcatcctcaacgcactgcccgtccgctggcgcggtccgctgctcgcggcctacaaccgcctggcctgggcgatcgcccggaaagggatgtaacgaaacgccgggacgcaaccgccgaggctccggccgatagtcggacgaagcctccgacaaccgttctccgccggacaaaaaaatcccggcatcgtgaaatgccgggatcgtctttatgtgcgaaacggaaaactactcctcttccgcctcgtccttcatggcggtatagacgttcaccacgtcgtcgtcctcctccagacgctcgatcagcttctcgaccgcctcacgctcctcgccgtgaagctccttggtatccgtagcgatgcggatcgactcgcccgacacgatctcgtagttctggtcgtcgagccatttctggatcgcaccgaacgactcgtagggcgcctcgaccgtaacggtcgtttcgtcttcgggtgcgaactcgtccacgcccaggtcgatcatcgaaagctccagctcttcgaaatccgtacctgccggcacgtggaacttgaacacgcacttgtgctcgaacaggaaagccacgctgccgctgttacccagcgtaccgccgcaacgactgaagtgcatgcggacattggccaccgtgcggttggtgttgtccgtcgccgtttccaccatgaccgcgatgccgtgcggaccgtatccttcgtaaatcacctccttgtagtcggccgaatccttctccgtggcacgcttgatcgcacgttcgatattctccttgggcatgttctccgccttggcgttctgaatcaggatgcgcaggcgggtgttggcggaaggatcggggcccgccgacttgacggcgatttcgatctccttgccgatcttggtaaacacccgggccatgtgcccccaacgcttcaacttgcgcgccttgcgatattcaaacgctcttcccatagttttctatattttttcaatgattcaacgactctaactcccacacccgaaacgtcttcggagaccggagcgcggcgcaaaattaagaaaaacaattcatattttacaaggaatatccaaaaatgtctaactttgccaaaggttttcgccgcgcggggaccggccggatccccggatacgaccgcgtgcctgaacgtccggttccgcgaccggaagagcggatcgcttcaccgcctccgggaacgaagcgaaaccgatttcccgcccgcgtcgccgcaaacggaagatgcaagccgaccttacgaccacgacccggagccgtgagccatctcggaaaccgggcgatcgcagtatcgggacgacagtcgcatccggccctcccccgaacaggaaacggcgaaagcccctttccgttcccgcgctgcaagggcagacggaatccggacccgcccaacggcgaaaacgaaacagaatattcaacgaaaacacgacaattatttctatgaaaatcaaagcccgcttcgaccatttcaacatcaacgtcaccgacttggagcgcagtctcgcgttctacgaccgggccctcggtctgaaagagatttcacgcaagcaggccgacgacggcagcttcatcctcgcctacctgggcgacggagaaaccggattccgcctggagctgacctggctgcgggatcacgccgcgacgccctacgaattgggcgaaaacgaaagccacctctgcgtccgcgtcgcgggcgactacgaagccgtacgcgcctaccacaaggagctgggatgcgtctgcttcgaaaaccacgaaatgggactttacttcatcaacgacccggacgactactggatcgaagtgctgcccctgaaccattaacacaagacggctcccgggaatcgctccgctccgggagtatccgcaaattcgaaaaacattatggcaacggaaaccatggaacaggccgtgacggaggccgtccggatccttcgtgaaggaggagtgatcctctacccgaccgacacggtctggggcatcggctgcgacgccaccaacgccgaagcggtcgagcggatctaccgcctcaagcgcagcgaaaacaagaaatcgatgctggtgctctgcgccacgcccgatatggtcgtgcggtacgttcacaaggcccccggcatcgccttcgaggtgcaggagctggccaccaagccgctcacgctgatcctgcccggagcttcgggcgtcgccgcgaacctcatccccgaagaggggacgctcggcgtacggattcccgaccatgccttctgccaggcgatgctgcgcaagctggggcgcccggtcgtttcgacttcggcgaacatctcgggcgaagatacgccccgcaacctggccgaaatctcccgcgagatcatcgacggggtggattatgtggtcaatccaaaattcgaaggcaaaccgacgggcaaagcttcgtcgatcctccttttcaatgaagccggagagttcaggatcatccgcgaataaagcaccgacagaactccggcctctttttaccatctaccaggcagagagcctgtccggatccctcgccaaaggcagcgacaggttcttgccctaaaaggtacaccttatggcacgaatcatcaaaacttttattcaaaagcgtgtttcggatatcgacatgttccagcacgtgaacaatgtatcgcagcagatgtatttcgacctgggcaaagcggatttctaccggcaggtcctgcaggacgacgtactctccggaacgagccgcatcatcacggccgcgaccgcgaactccttcaaagagcagatccggatggaggacgacatctacgtcacgactacggtcgccaaagtaggtaacaagagcatcaccctcttccagcagatcatcgggcgcaatgccgccgggagggaaacggtaaagaccgaaagcacctcggtcatggtcgctttcgacttcgaccgtcaggagtcggtgacggtgcctgaacgctggagaagaaacctcgcagattagcttcgcggatcaccaggataatactggcgaaaatcaacaccccggcgatgatgttggtgcggtcgatctgttcctggtgccgcacgagcgcgagaaccgtagcgactacgggctggatatagcggtaaagggccgtgtggatgaaagtgagcttctccgtgccccggtaaagcaggtacatcggcagcaccgtacccagaaccagcacataagccagctccgcctgaccgctcagcggcaggcgcagaaaatccgtatcggcaatgtatttccagaagaagggggcggtaataagcaacccgatgatatagtaccatcccatcaccaccaacgtcccgtaccgctgcaactgcggcttgatgatgaccgtattgaccgcgatcgccaccacggcgacgagcaccagggcgttgcccaggccgctgctgccgggtgccagccgaaaccccttgtcgaacaggaggaaagccgcacctgcgaaacccagcaccacaccgatacggcgtgcccacgtaatgttcttttcccgcagcaggaaatgtcccgtcaggatggtgaacaccggaccgagggtcgagatcgtcgaagcgtcgatcggcgaggtataggaagctccccacaacagcatgaacatccagccatagacgatcagcacggtcacgatcaggatattgccgaaatcgcgcagcggaatgcggtaggaccgtttcgagaaaagggcgaaaggaatgaaaaaaatcgacgccgcaagtacctgaagcataaaaatctgctggaaatcgaggtagttgcgcgtcaaagagacataaaacgaaaaattggcgccgaacaacagattggcgaaaatcagatcgaaattataacgcaacgctcccatagacggaaagcataggacaattttcgcaccaagttccggttttctgcgtatctttgtccctgtcaccaaaaaaggaatcaatcgaatggagcgcggagctctcaaagggcacggagccctgctgctggccaatgtcatctggggactgaactccccgatctgcaagaccgtccttctctcgcccgagaacccggaggggctcaaccatttcgccctgacggtctatcgtctggtcggggcttttctgctcttctggctggcatccgccttcctgccgcgcgaacgggtcgcctggcgcgacctgggcggactgttcgtcgcctcgctcttcggcatccagctcgaccagattcttttcctctggggactctccctcacctcgccaatcaatgtttcgatcatcgccaccacggtacccatcctcacgatgatcctggcgatgttctttctgcgcgaaccgatcaccccgctcaagacgggcggcgtgctgctcggcgcagcgggagccgtgctgctgatcctcatcagcagccgcggcgaaagcggcggcggatcgatcgcgggcgacatcatcaccctcgtcagttcggtctgctacgccatctacctgacggcctgccgcaaggtgatcctcaaatactcgcccgtgaccacgatgaagtggatgttcttcttcgcagcgatcgtagtggtcgtactttaccaccggcccgccctcgaagtggacttcccggccgttcccgcacgggtctggggcggagccgccttcgccatcgtactctcgacgttcctggcctatctgatggtgccgatcgcccagcactacctgcgtccgacggttatcagcatgtacaattacgtgcaacccgtcgcctcggtgcttttcacggtcgtgctcgggctcgacgttttcggattcacgaaagccgccgcagcgggctgcatcttcctgggcgtatggctggtaacgatgtccaaatcacgaaaagacctcgaagcggaacaagccgccaaaatgacggataagaaataaatcggccgaccgccccaggcgaccggtcgttccgaaaaacatgcagcgcaaggcgaatccctgcgctgcatttcatatacggtcatcccgcctctccgcacccgcacgacggcatacgggatcgggatcacccgccttacgataaaaatcaaaaggaaacaagctccggaaaacgaaccgcacgaggaagggaagggtcactcactgttttttccaaagtccccgttcttccgccagccgttccatcaaggcgtacgccgcctcataatcgttgggaatctccccctccagaatggcctccttgatgatctccttgatctcgccgatcacgcgggagggcggaactccgtaggtttccatgatgatctcgcccgtgatcggaggctggaaattgcggatacggtcccgctcctccaggtccttcatcttgcggcgcaccaactcgaaattctgcaggtagcgtttcactttggcgtcgatgccggacgtaatatccgcctcgcagagggtcatcagcttctccacatcgtccccggcctcgaacaacagccgccgcaccgcagaatcggtcaccatatcttccgaaaggataatgggacgcagatgcagaaaaaccatcttccgcacgaacttcatatgctcgttcagcggcagcttcaattgccggaaaatccccggcaccatcttcgaaccgaccacttcgtgcgaatggaacgtccaacccacctgaggatcgtaagccttcgtcagcggcttgccgatgtcgtgcaggatcgccgcccaacgcagccagagatcgtcgctcacggccgccacgttgtcgaggaccttgagcgtatggtagaaattgtccttatgggcgtgttgtccccgccgttcgatgcctttcagacgctgcatctcggggaaaatcagctccagcagccccgtccgctccagcaggtcgaatcctacggacggaacgggcgagagaacgatcttattgagttctacggcgatgcgctcccgcgaaacgatgccgatacgctccctgttgcggacgatcgcctcgaaagtttcggggaagagccggaaattcagttgcgaagcgaagcgcacggcccgcatcatccgcagcggatcgtccgaaaaggtgacatccgggtcgcacggcgtgcggatgattccctcgtgcagatcccgcatcccgtcgaaaggatcgaccaggcggccgaaatcctcctccgcgagcgaccaggccatcgcattgatggtaaagtcgcggcgccgctggtcgtcttcgagcgtccccgcctcgacctgcggcttgcgcgaatcgcgcacgtaagactccttgcgggctcccacgaactcgacttcgacacccctggttcggagcgccgccgtgccgaaagtcttatagacggacaccttggtccgcagttcccggcccagctcctcggccagcccgataccgctgcccacgaccacgacgtcgatgtcggtagaaggccgcccgaggtagaaatcgcggacataccctccgacgacgaaggccggaacgtcctgccgggcggcaatcgcggagatctgccggaaaaccggcagggacagaggagctgtggaatcgttttttttcacggaataaaatcagaattttaacaacattacgacctaccctccgcatccgtttcgatacggaacggacggaactgccccgcgacggcccgtcgaagagcgagccatccgccgggaaagcggcttcggagcgaatgccgggcgaattttcagaacgccagttcacggcggtaaagccgcacggtattttcgagcccgtaatagagagcgtcgcagatcagcgcgtgcccgatcgaaacctcgtccgtccagggaatccgctcgacgaaatagcacagattctccagattgaggtcgtggcccgcattgagccccagaccgcaacggcgagcctcctcagctgcccggacataaggctcgatcgcccgttcgcgcccggcggcgaaatcccgggcataggcctcggtgtacagctccacccggtcggctccgcactccttcgcccccgcaaccatctcggcgacgggatcgacgaaaatcgaaacccggattcccctggcctgaaattcagcggtcacctcccgcagaaaatcgcggtacttcaccgtattccatccggcattggaggtgatggcgttctcggcatcgggcacgagcgtcacttgcgccggacgcacttcgagtaccagttcgcggaacgaagggatcggattaccctcgatattgaactcggtcgtcagcactttcttcaggtcgcgcacgtccgaataacggatatggcgggcgtcgggacggggatgcaccgtaatcccctgcgctccgaagcgctcgcagtccagtgccgcacgtaccacgtcgggaagattgccgccgcgcgaattgcgcaccacggcgatcttattgatgttcacactcagttttgtcataaaaaactctatttacccaaaaacgacaggcaatccgtcaaactttacccgcaaatccgcacggttgcccgctcctttcgctatcttcgcacgcagtggatgcaccgtgataatcttcgggtacaaattctcacaattgcccggctttcactatctttgtagaaaacaggatgcgcctcggaaaactgggaacaagttcccgttttctcccggctttcactatctttgccgctggatagaaggcaactgggcaatctttgcgtgcaagctcgcacgattgctctcacctttcactatctttgcggaggtaaagttaattatttttccagacacgacggatgaaaatcatacttttttcccggcagggcgtcgtccacacggccggcgacctgcatcagatgttcgacgcgatcgcccgtttcgggttcgattacgcggtcaatgaggagttcgctccccagatcgaacgactcaccggcatatccatcgatgcggcccaccgttacgggcggccgatgggtccccagcctgcggagtcggtgctggtatgttacggcggcgacggtacgcttttggacggcattcaccggctgggaggggccgaaatccccgtcataggcatcaactcgggacatctgggttttctgacgagcgtaccccgcaacggctgcatcggcgatgtcttcgagctgatcgccgccggcaaactcgaatgtcagccccgatcgatgctcgaggtcacgggcgacttcggcgacggcatctcgacccgctatgcggtcaatgaagtggtcatccagcgccagggcgcgggcatgatctcggtcgaaacgtacgtgaacgaccaaatggtcgccacctaccacggcgacggcctgatcgtcagcacgccgaccggctcgacggcctattcgctcagcgtgggcggtccggtcgtcgccccccaatgcgcctgcctggtgctctcgcccgtcgcgccccacaacctgacgatgcgcccggtcgtgattccttcgtcgagcgacgtgcggctcaaggtacacgcccggcacgccgaaatatcgatcgccaccgacaacgaaacctgtccgattcccgaaggagccgaattcagggtccgactggcttccagacgcttttttctggcggtcccgcacaatatatcgttttacgacacgttacgcaagaaaatgatgtggggagtggatatccgaagctgacgaaaaacccctgtttgccggaaattctttcgctttcggattttattccctatatttgcatgctatgagcgagcaaaaacgcatacctcgacacgtcgccattatcatggacggcaacggacgctgggccgcgcaacacgggctggagcgtttcgaaggtcatatccggggtgtggagtccgtgcgccgggcaatccaggccgcgacccgtcacggggttcgctacctgacgctttatgctttctcgaccgaaaactggggacgccccgccgcagaggtcgatgccctgatggagctcttctgcaagagcgtaatcaacgaaacgcccgaactggccgctcagggagtgcgcgtgcggatcatcggcgacaaaagccgtttccccgaaaaagtaaaacaccacctggatcagatcgaaaaccgaacggctaccgggaaacgccttacgctgcaactggccctcaactactcttcccgcagcgaaatcgtccatgcgatgcagggtctggcacgccgtgccgcagccggcatcttctcttcggaagagatttccgagcaaacggtttccgaagcgctctatacggcgggctgtcccgaccccgacctgctgatacgcaccagcggcgaacaacggctcagcaatttcctgctgtggcaggctgcctacgccgaactctttttcacccccgtattatggcccgactttaccgaagaggatttcgcgcaggcactcgacgaatatgcccggcgcgaaaggcgtttcggactggtaaaaaataatgaacgtattcggtaagcgagtgcatcacgagtttactcgctacactgaacggagagaatgaagaaagaaactctagagagaagttagacgacacacgatgaatcatccaggcaaagtatttctgacactgacggccgccctgctgctgctctgtccccagatattcgcgcaggagccctccggcgaggcggctccgcccccggccgaacagacggatcaggacgaggatacgaaccagcttttacagcaattcgaaaaagccccgacgctcgaaggcggtacccagaaactttaccacatccgcaacgtcaatattcacggggcgcaatacattgacaacagcattctgcgagcttcgtcgggtcttatcccgggcgattcgatatacctgcccagcaacttcatctcgacagccatcacccgcctgtggaaccagcgcctcttttcggacatccgcgtcggtgcgaccatcgaaggcgacagcctcgacctggaagttttcctgaaggaacgtccccgcgtcaattactggcgtttcgagggcatctccaaaagcaaccagaaagacctgctcgaaaagctcaaactcaagcgcggcaccgagctttcggactacgtgatcgacaagaactcgaagctcattcacaaatactacgcagacaaaggtttccgcaacgccgaagtatcggtccgcatcgacaacgactcgatactgaagcaggccgtaaacgtgaccttcatcgtcgatcgcaaacgtaaaatcaaaatcggagagatcaatttcacgggcaacgaagaattttccgacaaacgtctgcgccgcaccttcaagaaaacccaccagaaaagcctcaacttcttccggggggcgaaattcaacgaagaagatttcgaaaacgacaaggagctgctgctcgacttttacaattcgaaaggtttccgcaacgccaacatcgtcgccgattcgatctacgcgatcaacgacaagcgtatgggtatcacgctggacatttcggaaggcaacaagtactacatccgcaatgtttcctggatcggcaactcggtctatgaaaccgacgaactggctcggatgttcggtgtcgaaaaaggctcgatttacgacaaaaaatcgatgtacaagcgcctgggcatcggcgcctactacaatccggacgaaccgtccatcaccaatctctacaaagatcagggctacctcacctcgcagatcgacccggccgaaatcatcatcggcaaagactcgatcgacctggaggtccgcgtattcgaaggcaaacaattcaccatcaacaatgtcggcatttcgggcaatatgcggctcgacgacgaggtgatccgccgtgaactctacacgcggccgggcgaactctacaaccagtcgctgttgttccagaccatccgcaccctgggttcgatgggacatttcacggccgaagcgatcgctccggacattcagcccgtcgtcaattcggacgaattggtcgatatcaactggccgctcgaggagatcgccagcgaccagttccagatcgccggcggttggggcggcggtacgttcgtgggttcggtgggtgtcacactgaacaacctctcgatcaaaaacttcttcaagaaaggcgcctggagaccctacccgatgggacagaaccagcggctgtcgatcagcgcccaaaccaacggtacttactacaaagccttcgcaatcagcttcaccgatccctggatgggcgggcgaaaaccgaactccttcacgatttcggctcactattccgatgagaacaacgcctattacgcctggcagaaaggtacccgttatttccgcaccgccggtgtcgcggcgggactcggcaagcgtctggactggcccgacccgtacttcacgttctatgcggaagccagctacgagcgctacatgctgaaggactggaacaccttcgtactcaagaacggtgcggcaaacctgctgtcgatccgcctggtattgggacgaaattcggtggatcagccgatctatccccgcaggggttccgatttcagcgtttcggtgcagctcactcctccctattcgctgtgggacggcaaggattacaaaagcacggctttaagcgaacaggaacgctacaactggatcgaattccacaagtggatgctcaaaggccaatggttcactccgctgacccgcaacggcaacctggtgctgatggcccgcgcagaaatgggatacctgggacattacaataaaaacaaggtatcgcccttcgaacggttcgaagtcggcggcgacggcatgacgggctataatatgtacggtatcgacattatctccatgcgcggttacgacgacggagcgctcgatcccgtaggcagcaactattcgtgtgcctacaacaaatacacgatggagctccgctatccgctcctgctcaagggacagaccaacatctacgtactgggattcctggaaggaggcaacggattcacctcgtggaaggagttctccccgttcaagatcaaacggtcggcgggtatcggcgtgcgcctcttcctgccggtcgtaggcatggtgggagtcgattggggctggggcttcgacccggccgcaggacagaccaagcgcagcggcagccacatccatttcacgatgggtatgcagttctaaaccggcggaagttggcaataaatttgaagaaacagggttatacttataaaagataactaaaaaataaacggtatgaaacggatccttttgctcgtactcgccttcacggcagccataggctcgctttcggcacagaactacatcgtggtaaacagcgaaaaagtattcaagtcgatcgacgaatataacaaagcactcgacacgctcgaccaactggccaaaagctatcagcagcaggtcgatctcaaattcgaagaggtcgaagccctctacaacaactataaggcgcaggaaatgtccctttcggcttcgtcacgacaggcccggcaaaacctgattctcacccgggaagaggaggccagcaaattccaggaggagatcttcggccaggacggtacccttatgaaaaaacggatcgagctgatccagccgatccagaaacgggtattcgacgccattgcgaactatgccgcacaaaacgggtatgagctggttctcgatgcggcttcgaaccccacgctgctttacaattcagaaaaaatcgaccacactcaggccctcatcgaatttatgaaaaagtaagaaatatcgaatcaaatcaataaatccgtatgaaaaaactcattaaattaaccctcgtggttgccttggtactgggaagcagttccctgttcgcacagaagctgggccgtatcaatctcgaagagatcattacccttatgccggaatacaaggagatgatgaccaacatggaggcgtacagcaaagatctgcgcgacaacctggaaacgattcaggtcgagctgaacaccaagtacaacgatttccagaaaaacaaagcgacctactcggaggtaacccgccaactgaaggagaaagaattgaccgacctgcaaaaccgtctgcaagagttctaccagagcgcacaggaagacttgcagaaaaaggagaaggagctgaccgacccgatcgtcgccaaggctcaggaggccgtcaagaaggtggcgcaaaagggagcttacgtcgccgtattcaatacgaccatcccctcgatggtctattacgacgaagcagccatgaccgatttgagcaccgaagtcaaggccgagctggggattcaataaacggcaacgcatcgacaacaaaaagcgtccgcttcggatttcgaagcggacgctttatttcttccaaaagtcctttccgagctgcggaaatcaaagttcaacatatccttcccctgccgacacgaactccgtgcagacgaatcatcctcgcccgacagcggctccatacacagccccggccgccgcagtgaaaatccggtacaccgcccgctccggcccatattcccatatcggcatcagaacggataacctactccgaaattaagcgccgtattcttccacttgaaattgtggatccaccgttgtccggcaggtgcattggggttgtggatctgtatgccccagtccagacgcagtacggcaaatttgatgtccaggcgcagaccgataccggcatcgaagcccagttgcctgtagaaactgtcgaaatggaaaaccgcagcgggcgaaggcgcggaatgccggtcggcaaaccagatattgcccacatcgacgaacgtcgctccgtgaaacatcccccaaatcgggaagcgcaattcgagattggcctccagcttcatatcgcccagttgtgtagggaaaaccgcatcttccggctccggaacagcccccggccccaacatacggggtgcccaaccgcgcatgctgttggcaccgcccgcataaaacagacggtcgaagggaatcgaagtcgaattgccgtacgccataccgtaaccgccgtaaagccgtcccacgagagccgtcacctcaccgagcatgatcttgcggctcacactcaaatcggcccggaaatattgcgaatattgaagaccgaaaacctcgtaatagtccttcccggccgccggacgcgagaagaggtgcatcaggccgtcgagcaggttgcccgccatctcgtaattgaagcggagcagcgtcgcgtttccgcccagatgcttgcgctgattgttatagacatagctgaacgaaaggccgctgatgaactgcgactcgtaacttcgcttgagatattcgttctggagatgatccaggaaatcctccctattgacataccccatatcgatcacgttgatatcgatcggacgcagcgaatagctcgaatacttcaaatcgctccacgaatatccccaagccacgctggaaagggtacgccggtaataagggcgatcctggaaattgatgccgaattcgagccgggtccggggcatctggatcgactgccaccgctgggttcggaaaggcagcaggaaacggggaaactgcaaacccatattgactccgaattcgatggcgttgcgcttgcgggcactcggagttttcatatactcgtaccctaccgagaacgaaacgtcgaaagactccgctccccggaaaatattgcggttctgataccccaccgtcgcccgcaatccgtagaaactcgacgtcgtacttccttccagctctatcttatacccctgcttcaaggccggaatgcactggatgtcgcactggagatagccctcgcgggtctgatgtaccgaatcggccggctccttgccttcgcccacgaaagtcacgtagttatcctttgccacactgtcggcctgctcgttgaaaatgacgttggcgcttttgaaatagcccatcgacataatctggttgtacgtctgatcgacccggttaatgttatagacgtagttcggatagatcggcacgatctgtcgcagcaccgaaggacgtatgttgggacgcttgttgtccttgtggtacaccacgttcaacccccggtagtagatcgtgtcgagtcccttgcggtagtcgggagcaatagccgccgtaggatcgtaattgggaaaaatattgatctggtcgatacggtaaaccgtattgttgcgcagaatcggataaccctgctcgttataaccggccagatgctgcttgacgatcatcttcaggtccaccagatgattgccgccgagcgtgtcggcttcatactcgatgttattgaccgtaaaattgtaatagccgcgctgtttgaggtaggtggtgatgcgctgccgctcctggtcaaggacctccatgtcgaacacctcgcccgtacggagcagcgaatgtaccgtatcgggcaggatgatctgctcgaggaaccgatcgcggaaatcgtacgaaaggcggttgatgcggtaaggctcgcgctgtacggtgcggtaggtgatgaaagcccgctttttccgcgacgtggtatcgacttcgtaagtcgcctgcgaagagaagaacccccgatagtccatgtaaaccttcaggttgcggaccgactgctccgtgaggctcatatccagcagcacgggcgcttcgccgatacgccgtttgaaccggttccaccaattatccttttcgggatcggcctgctcataaacccagacgtaaaaattgagtcccaggaaccgtttattcggattctgacggatgaatttccgcaggtcggaagccggaatacgctcttttttaggcgtttccttatcggcttctacggtcaccttctgcaccagataactttcctcgggaagtttgcgcgtgacactgcacgacacccccgcgagcaccgccagcaaaaagacgaatatgaccggcaaccgtttcaagacttccgttaattgttgaagaaaccctgttttttcagcagcgcgaaatagttgcgcgaaatagccaggttatcttcggcacgatacctgttgcgcgtgaaaatctgtgccagattcggcaggccgttctcctcgagcagccgccgggtctcttccgacgtctccttctcggcccagagttcgtcgatctccgacgaggtgtaatgatggtatttctcgcaatgcacgaccgcatcgagcggcaggcggtcggtcagttcgggcgactcgtcgggatgccccaccacgatcgtcgtcacgggaatcacccctttgggaagatcgaggatgcgggcgatctcctcggccgtatagatggtcgtaccgaggtaacagattcccaacccgtgcgcttcggcctcgacacacaggttctgcgccgccagcagcgcatcggtcaccccgttgagaaaccaggcgaaattatcgtagcacggctcggcatcgcgctgttcgcaccacatcgaaaaacggtggacatcggcacaaaccgtaatcacgcagggagcctgcgtaaccatcggctgattgaaatgacacggggccaatgcctcgcgcaattcccggctctgagtaacgatcagactgtaaagctgcatattgccgcacgtcgaggcacgcgaggcggcttcgagcatgtcttgcagcacctccggcgcaataggctcagagcggaattttcggatcgaacggtgttttgcaagcaatgttttcatacggattataagttacgtaacaaattcacgcaaaagtagtaaaacttttagaattttattatttttgtccgcgttaaagctggttggaacctattttgcagcgccccagaaaaaccctcttccgtcccggacatacacgcgttttcaggatgcaagagaagtgccgaacggctccgacctccgaaccggaatagcgacaaagccgatatttcagaacagatgcaaatgcgattcgcaaaatacgaaggtgccggcaacgacttcatcctgctcgacctgcggaacggcggagcgactccccaaagcgcggagatcgcccgtctgtgcgaccgccatttcggtatcggagccgacggtctgatgacgctcgccgcttccgccgtatccggctgcgactgttcgatgcgctactacaacgccgacggctcgccgggcgagatgtgcggcaacggaggccgctgcttcgccctgtttgcccatcacctgggcatcggcggcgacatcaagcggttcgactcgacggatggcatccacgaagccaggatgcttcgtatcgacgggctgcgaagcaccgtggagctgggaatgatcgacgtcgaacggatcgaccggggcgacggatactggttcctcgatacgggcgttccccactacgtcgaattcacggacgacctcgaagccgtggacgtcatcggacgcggacgccggatccgctacgacaaacgcttcgccaaaggcaccaacgtcaatttcgtcaaggtagtcggtcccgggcatatcgccgtccgcacctacgaacgcggcgtggaggacgaaaccctcgcctgcggcacgggatcgaccgctgcggcgctggtcacccacctcgcggcccagccttccgtcacagcgttccgcatcgacgtacgcggcggacggctcagcatcgccttcgatgagccgaaacccggcatctacacccgcatccgcctttcgggagaggcccgcaaagtattcgaaggcagctacgataccgccaactttcaatcctaaatctattttttcttctccgatccatgaaaacgaacaagggattccgcgacgaaaaccatgcggacgaacttcgtaaggccaaacggctcgagccgatccacaaaagcggcaaggaacgccacaccatctaccgcgaactcgacgacgaggaagacgatgcgcccgcacgccccaagcgggaatcggcgttcgactatttcgacgacgaggaaaactgaaaatccacccgacaatggttgaaaaattcattacggcaggcgacacgcccgtccatgtgtgcgactccgaaaaaggagaccggtgcgcggtcctgttacacggttatctggagtcgatgctcgtctgggacgatttcgttccctatctttacaaacaggtacgcgtgattacgctcgacctgccggggcacgggatctcggtggtcaaagggcctgtacacacgatggaatacctggccgatgtggtaaagaatacgctcgatgcgctcggcatcgcccgctgtaccctggtgggacattcgatgggcggttacgtcgccctggctttctgcgagaaataccccgaacgactcgacggcgtggtgctgctcagttcgacgccggacgccgatacggacgaaaagaaagaaaaccgcctgcgggaaatcaaattggtcgaagcgggcaaaaaggacgcgctggcccgcgtagctcccgaagcgggcttcgctcccgaaaaccggccgcgaatgcgcgacgagatcgaagatctggtcgaacaggtattcgtcaccgaagacgaagggatcgcagccctgctgcgcggtatgatcgagcggcccgaccgcaacgaaatgctccgccgctctgcggtgcggcagctcttcatcttcggtaagcacgacggctatattcccctcgaaaaggccgaagcactggcggcggcccatcctcaagcccgcgtcgcatggctcgaacattcgggacacatgggattcctcgaagaacccgaaatcacggctcgggccctgttggattttatgggaacggaaaatgaaccggaatcccgataacgaaagtttcctaaaagggaaactttttcatttttatttctccagacgcagatgcagaatcggaaacggccggccgacatcatccgtttcgctgcgcccggcaaccgcaaaacccatacgcaggtaaaaacccatcgcctgcggattctgttcattgacatcgaccgaatcggcttcctggcgggcgacggcccactccaccaacttgcgtccgcagcctctgccccggtattcgggccgaacgaacaacatggcgatatgacttccgtccagaccgatgaacgccacgatacgccccgcatcccgcaggcagcgaagttcgaccgccggcaggtagcggacaggcaacagagaacgcaattcccgaatatccgcttcggagagaaaatcgtgggtagcccgcacggaagcctcccacacctcggccagctcttcgaaatcgtccggtccgactttcacaacattcaaaccattcataatcaattatatacttcaacacacactatccgacgatcgcttattcgcggcactggccgcgtttatgcttccgaaccgctcccaagccccttcctcgaaaaggacctgtattgtcacgctccggcatataaacgtattaattatcaaccgataaaaaagacgatccccgccagatgcgacaacagcgccaggtcgataaacagatgccaaaccagatggtggtagcggaatcccttcttcgcataaacgatcgctccggccgtatagagcaccccgcccagcaggatcagcaacagcagaggcagcgaagcgttccgaatcagccggggcaggaaaaagatcgccgtccagcccatcaccagataaatcgtcaggctcaaagccgggatggaacgccgggccagcgtcttatacagaatacccagcagaacggccgtccactgcaaaacggtgacgaagacaccctgccagccaccgatcacgagcagcgctacgggggtataggttccggcgatggcgacgaagatgaagatatggtcgagcttgtggaaaacggccttgtgcttcgaatccgggcgcatcgaatggtagagcgtcgaagccagcaacatcaggaagatcgaaatgacgcagacgcttaccgacaccgacgccagcacgggccgggcatcgtgcagataggtccacaccgcagcgaaaggcagcagacaaagggtcagcggcagcatcacggcatgcgaaaccgtgttggccacctcctcgccgtaggtgggtacgtagggcaaacggactttttcctcttttttcatagacgacgtataattctgttctacaaagatacgttttttatacaactgcatcggtttttgcacaagattattccgtgaaatccccgacggcgctttgcgatgccgaagattttcgctacttttgaaaaacagtaaaactttccggaaaatggatttgacccgttatgacaagctgcgcagcgcgatccgccgaacgctctcgcccgacgaggcggccgcagccgaccgcgccctggaatatgctgccgaacataccgcttcgcaggtacggcacgacggctcgccgatgctggaccacgccgccgaagtagcgcggatcgggctggaggagatcgggctgggaggcgactcggtcgtagccgccattctccacgacgtagtccgcacggccagccggcaggacgaagagacattcctgcggctgacggacgagatccgggaccgcttcggcaaggaggtgctcggcatgaccgtaagtctgagccacatctccgatattcgcctgaaagcctcccgggagcaggcggaaaatttccgcgagctgatcgtctcctattcggaagatccgcgcgtgatcctgatcaagctggccgaccggctcgaggtgatgcgccgccttgaaattttcccccgcgaaaagtggcgcaagaagagctgggagagcctcaacctctacgcccagatcgcccacaaactgggtctatacaacatcaagagcgaactcgaagacatcgccctgcgctacctcgaaccccaggactaccagcatatcgccgacaaactggccgaaaccgaaagcgaacgccgggccttcatcgcccgcttcctcgaacccatcacgcagcggctcgaccaagcggggctgcgctatcacgtcaagagccgcaccaagtcgatcttctcgatctggaacaagatgcgcaagcagcacgtcccgttcgagggggtatatgacatcttcgccatccgtatcatcctggactgtccgctcgaagaggagaagcagcaatgctggacggtctattcgatcgtcacggatttctacacgcccaatcccgagcggatgcgcgactggatctccatccccaaatccaacggctacgaatcgctccacaccaccgtcgccaccaaagagggacggtgggtcgaaatccagatccgcaccgagcggatggacgccgtggcggagcggggcatcgcggcccactggcgctacaaaggcgtaaacgcgggatcggacgggagcgaaatgtggatgaaacaactccgggagctaatggaagacaagacccgtccgctggcccagaacttcgacgccaagccctcctcgggcgaaattttcgtcttcacccccggcggcgacctgcgcaagctgcccgaaggagccacggtgctggatttcgccttcgacatccacacctcgctggggctcacctgctcgggcggcaaggtcaataaccgtccggcggcgatccgcgacgtactccacaacggagacatcgtcgaagtgctgacgcagaagaatcagaagcccaaagccgactggctggggttcgtcaccacgtcgaaggcccgcacccggatcaaggcctcgctgcgcgaggagcacaccaagaacgcccgtctgggacgggaagaattggaacgcaaactcaagaactggaaactgcccctgaccgtcgatgaaggggtcggcatcctctgcaagcacttcaaactccgcacgggaacggaactttacgcctcgatcggcaccgaaaagatcgacctcatgcagatcaaggagctgcttcaggcccatctgtcgggcgaagcggaggaagagcgccgggccgcagcagcagccatcgagtccgaaaaacgacgcaaagccgaaaaagtttcgacccagagcagcggcgacgcactcatcatcgacgaaaagatcggacagctcgactacaaactggccaaatgctgcaatccgatccacggcgacgaaatcttcggcttcatcaccgtaggtgccggcatcacgatccaccgtacggactgccccaacgcacagcgtctccgcagaaactacccctaccgggtactcgaagcccgctggcgcgacgaagcgcagggcgcgttccgggtgtcgatccgcgtggtggccagcgacacgacggggatgatcaaccacatcgccgaagtaatcaaccgcgacctgaagttgagcatccgctcgatgaacctgtcgccgggcggcggcctgctctcgggcgtgatccacgtcgaagtgcccggtacgggcatggtcgatatgctgatccactcgatcctgcggatcaaaggcgtgcagaaagcctaccgcgtcaataactgaaaacgccccgaaaagagaaagccgcctttatcaggcggcttcttcgtcgcatccgacgggtcggcaacccgccagcgcatcataaaaagcagtaaaaaaagatacaaaacagcccgcagaaaaccaccctcgacctgcaagtgtatcctgtcataaaaaagagtgtgttgaaatgaaaatttcaggcacgatcctaaagggtgtcggaatggatgcaaggcaaggcattgagggtaagggtgacagtcttttactatggcaaatgacttaacccgtatcccgataataactaccgttgtgtgtcattcggacacaccgccatacacctgttcgggtcccatgtccggaaatttacaacggacctccgccgatcggacaatccgcactcccgcccggaaatccgagccgagccgcagaaaatccagacaacaggtcaaaaattcgcacgaggaacccggaaccaagctgcacgggcaaccgcttccctaccggtcccgctcaccgacatagacacagaggttggccaatgcgtcgcggtattcggaaggttcgtattcggagagcacggacatcgcccgcgcgaggtattcctgcatgacgcgggccgccttttccataccgccctcgttctcgacgatgtgctgcaaatattcgaccgactcatcctcctcgtggcaacgggccagccgtgcctgcaactccctgcggcgctcctcgccgaccgactcgagcaccgtgagcagcggcagggtcaccttgtgttcgcgcaagtcgttgttggagggcttgcccgtacgggccgtgcgggtatagtccagaatgtcgtcctgaatctggaacgccatgcctatcgactcgccgaacttgcgcatgagcgcctgtttttcacgggacgcaccgacggccagcgctccggccgaagcgctcaccccgatcaggcaggcggttttcttgtaaatgatatccaggtacgacgcccgcgtcatctcctgccggttcgccttgtcgttttgcagaatctctccctcgcagagcgtggcgatggcgccgcaaacatgagtcaccaggtcgaactggccgctcttgaggccgagatccatgtttttggccagaatgtagtccccgaccacgaccgcgttgcgcgactgccagcgggcattgaccgaagcccggccccggcgcatgtccgattcgtcgatcacgtcgtcgtggatgagcgaggccacgtggatcatctcgaccaacgtggctgcgagcaacgtgcgcagcccgccgctgcgctgccccgccggagcgttgagcgccgcagacagcagcaccgtcatcggacgaatccccttgccccgcgccgagagcgcataatcgagcatctcggagagcaacgtgccgtccgccgtgaatttctgccggatgaactgctcgaaggcctccagatcgccctcgaccggcttgcggatcatatcgagtgttaccataaccgaactttatgtttacgtcgaaaaaagttttgccgaatacagaccgatcgttttccccgccggaatacaaccgtcccgagcctgggatcaatccgtgcaaaggtagtgatttttcgctgagtcggggaggaaactcaatgttttttcgtacctttggcaatcgacaaaaacattccagatgacccgcttcaaagagattctcccgaaagtgctgccgacgggcgcggccctgctgcttttcttcatcgtcagcgccctctatttcgccccccagtttcgcggcgaagtgctgccgcagcacgacgtgcagcaatacgaaggcatggccaaggagatctgggacaaccgtgcccaaacgggcgaagatccccagtgggcggggcggatgttcggcggcatgcccgcctacctgatcaacgtggcctacccggcacaactggtcaaaaacacggcaggacagatcgttaaaattataaacacccctgcagccttcgtcttcttcgccatggtttccatgtggctgatgctcctgatcgtcggggtgaatccctgggtcggcatcattccgtcgctcatgtacggcctttcgacctactttttcctcatcatcggtgcgggtcacgtgaccaaaatgtgggcactggtatatgcccccctgatgatgggcggcgcatggcttacgctgcggagcaacatgtggctcggcggagcgctcacggcccttttcgcctcgctcgaaatcggcgccaaccatccgcagatcacctactatttcctgctggccatggccgcgctgtggatcagcgaaggaattgtcgccttccgaaaaaagcacctgccttcgttcgcccgccgtacggcggtactgctaggcgcaggcattctggccgtcggctcgaacttcgcgcctctgtggtacacgatgcaccactcgaagcagaccatccgcggaggttcggaactcgccgccggcgaggaaacctcccaggaagggttggcactcgattacgctacggcgtggagctacggacgcgccgagagctggaacctgctgatccccgacttcatgggcggcgattcgggtcgggcgttcacccgcgacggcgaaatggccaaagcccttaaaccatacggtctggaaagttttgcggaacagttaccggcctactggggcgagcagccctacactgccggaccgacctacttaggagccgccgccctgttcctggctctgctgggactcctgctggcatcgggacgcaacaagtggtggatcgcagccgtcagtctgctgacgcttttgctggcctggggacataatttcatgggattcaccgaattcgccttcaaatacctgcccggctacaacaagttccgcaccgtatcgatggccctcgtggtggtcgaatggacggttcccctgctcgcggcgttggctctgatgcccctctggcggggagaagtgccgcgtcgaaaactcctgcgggccctcgcctgggccggaggcatcacgggcggtttctgcctgctcttcgccgtggccggcagcgcgatcttcgacttcggccggacggaagccgccgatttcatgagccgccaatactaccagatgttccaagccgcaggtatgcaggaagccatcgcacagggcgctcccgaagaattgggagaggtgacggccgacgcgatggccgccgaccgggccgcgatcatgcgctccgacgcctggcgttcgctgctgatgatcgccctcgcggcgggcagcgtgctgctcttcgccctgggacggatcagacggggctggctcatagcgctgctcggcgtgatcgttctgatcgacctggtgccggtcaacctgcgctacctgcctcaaagccgcttcgtcgccgcacgacgccaacagatacagcctacggaagccgaccgcgcgatcctgcgcgacccggaacccggattccgggtgctgaacctcacggtcagccccttcaacgatgctacgacctcctacttccaccgttcggtgggcggctatcacggcgccaagctggctcgctaccaggacctgatcgagcgttatcttacgtcgatggacgagagcgtactcgacatgctcaacacgcgttacctcatccgcttcgacccggcgggacagcccgtcgccgaattgcggaccacggccaacggcccggcctggttcgtgcaggaggtcgtcgatgccgccactcccgaagaggagatcgacgccctggggcgcatcgacaccaaaacggcggccgtcatcaacacccgagagttcgagatccgccccctgatcggcggcgaaggggaaatccgcctggaggagtaccgccccaattatctccggtacgaatacacggccactgcgcccggcacggcgatcttctcggagatctactacaaggacggctggacagcctatatcgacggcatcgaaaccccatatttccgagccgattacctgttgcggggaatggagctcccggccggtacgcacacggtcgaatggcggttccgcgctcccggatggaacaccgtcgaaggcgtgacgctcgtcgcgtcgctcacgattctcgcaggcatcattgcaaccgttatactcgttttacgccatgaaagacgacaaaagactcaagcgtagggtacgcaactcctacatcgtttcgaacatcagcatcgccctggtgctcttcctgctgggatcggtgggatacctgatgacggccgccatgcaggttgcccgcacgttgcaggagagcgtcaccgtcaccgtcgagctccgcaacggagcggacgaaggacaaaaagaatcgctccgcaaacggttcgaagccaacgagctggtgagccatgtggaatacagctccaaagacgataaactgaacgacgccgatttccggcagatgttcgaacaggagttcgaggcgatcctcgaagagaatccgctgctcgactcgttcgagctgaccctttcagccgattcggcggacccggacaaactcgaaaccttcatcgcccagactgccgaactcgacggcgtggaccgggtttcctatccggcacagaccatcgagcggctgcatgccacgatcgcgaagatccggctggtgctgctgctcttcggcggagccctgctcgtcatctcgctcatcctgctgaacaacacgatccgactggccatcttctcgaaacgctacctgatcaacacgatgaagctcgtaggggcaaccaaatggttcatcatgcggccgttcctgggcagcagcatcacgcagggcattctttcgggaatcatcgcctcggcactcttcctgacggccgtttacggactgaacgaagcggttccggagctgatgtcgctggccgaaacgctgaaaatcgccatcattgtaggcagcatggtattgggcggcatcctgatctcgctctgcttcacgttcttcgccgtcaataagttcgtcaatatgaaatccaacaagatctatctctactaaaaatccccgcaccatgaaaaaattcaaggagatcaacgataaaaacgatccgaagatgccgctctcgctcaagaactacctcctgttgctcgccggactggtcgtcatcattctgggcttcgtcctgatggccggcggcggcagcgactcgcccgacgagttcaactacgccatgttttcctggcgccgcatcacgctcgccccgatcctggtgatcggcggcttcatcttcgaaatttacgccattctcaaacgattctgaatccggacttctccgaccgccggaagccgggttgcaacccgcgcttccccgacaccgaaatatccccgagaactgtaaaatggaaaccattcaagctatcatcctgggcatcgtccagggtctgaccgaattcctgcccgtatcgagcagcggccatctgcaactggccaaagaactgctgggcgtcgatcccgaagtgggaggactcaccttcgatctcacgctgcacgccgcgacggtcctgagcacgatcgtcgtgctctggagcgaaatcaaacgcttggtcgtgggactcttctccaaacgattcaacgcggaacaggcctacgtgctgaagatcatcctttcgatgatcccggtagtcatcgtgggcttcacgctggaaccttttctccagtcgctcgttgaagacctgccgaatcacggcatcctgctgctggtcggaaccatgctgctggtcacggcggtgctgctgaccttcgcctactacgccaaaccccgccacaaggaaaccatctcctaccgcgacgccttcatcatcggtctggcgcaggcggtcgccacactgccgggtctgtcgcgctcgggcacgacgatcgccacgggactgatcctgggcaaccgcaaggagagcgtggcccaattctccttcctgatggtgctggcaccgatcctgggcaaaatggttctcgatctgatgagcggagaactggccgcccagagcatcgggaccgcccccctgctcgccggattcgctgctgcgttcgtagtcggctgtctggcctgcaaattcatgataaacatcgttaaacggggaaagctcaactggttcgccatctactgtacgctggtcggagggctggccatcatccgctatttcgtgatccaataatccgcacatgacgcaacaatccgaactgaacctacagggaatcgacttcgaagagggctacatcgccgtcatcgacaaaccgctggagtggacctcctcggacgtagtccgcaaaatcaagttcgccctgcgcagggccggttacccgaaaatcaaggtcggccatgccggaacactcgatccgctcgcaacgggcatcctgctggtctgcatcggcaaggcgaccaaaatggcggacgccctgcaagccgaggagaaagagtacgtcgccgacctgatgctgggagccacgacgcccagcttcgacctcgaacaccccatcgacaggacctatcccttcgaacatatcacgcgcgaagcggtcgaggaggtactccgctcgctcaccggcgaacggctgcaaaccccgcccctctattcggccaagaaggtcgaaggcgtccgggcctacgagctggcccgcgcgggcgaagaggtggaactacgcaaagcgctcatcaacatctacgaaatggagctcatggaatacgacctgccccgcatccgcatccgggtccggtgcagcaaggggacctacatccgttcgctggccggagagatcggccaggcgctcggcagcggtgcgcacctcacctcgctctgccgcacccgcagcggaggttttcggctcgatgcggcgcacgaattgaacttttttctcgaaaaactgcaaaaagctgaaacaaaataacttatttttcgtatagataaattgacggtttatcttgctccgtgcccgcaaaactgcccgcagcgctgcccacggaccgaaaaaatgttcgcaaatacttttagccatgaaactatcgcaatacggttacgacttctccgccgacctgctggcgaaatacccggccgaaaaccgggacgaatcccgcctgatggtggtcaatcgtgccaagggcaccatcgaacaccgcattttcaaggagatcatcgaatacttcgacgaaaaggacctcttcatcttcaacgacacgaaggttttccccgcccgtctgtacggcaacaaggagaaaacgggcgccgagatcgaaatcttcctgctgcgcgaactcaaccgcgagttgcgcctgtgggacgtactggtggatccggcccgcaaaatccgcatcggcaacaagctttacttcggcgacgacgacctgctggtagccgaggtgatcgacaataccacttcacggggccgcacgctccggttcctgttcgacgggtcctacgaagagttcaaagaaaccctcttcaaactgggcgaaaccccgctgcccaagtgggtgcgcgaaaaggtcgagccggaagacgccgagcgctatcagaccattttcgccagcaaagagggcgccgtagccgctccgacggccggcatgcatttctccaagcatctgttcaaacgtatggagatcaaggggatcgaaaaggcgttcatcacgctccacgtcggcctgggcaacttccgcacggtcgatgtcgaagacctctcgaagcacaagatggactccgaacagttcttcgtggacgaacccacggccgaaacggtaaacaagaccaaacgcgaaggacataagatcgtttcgatcggcacgacggtcatgcgaacgctcgaaacggccgtttcgaccggcggcatgatcaagccgatggagggctggaccaacaagttcatcttcgccccgtacgaattttcggtggccgacgccatggtgaccaacttccagcttccctactcgacccaactgatgatggtttcggctttcggaggttacgacctgataatgaatgcctacaaaatagccaaggaggagggctaccgcttcggaacttatggcgacgcgatgctgattctttaagaaaaatcactatctttgcggaagataggaggcggttcggcaatcttttgcgtgcaagctcgcgcgattgctctcacctttcactatctttgcgaaagataaactttcgtgaagtgaggtacggcagcacgacaaggcaacttttcgcattgcatccggcccgtgccttcttcgccgagcaagctaaaaaatcatcgtttccgaccggcgggcactccgagcgcaccgcaccaggagatgaagaaaaaatttcaaccaatggcatcgaacaggatactatacgtctgtcaggaagtggctccgtatgtcccggatacggagggggcgcttctgtgccggcggctctcgcaggcgatgcaggagcgcggcaatgaaatccgcacattcatgccccggtacggctgcatcaacgaacggcgtcatcaactgcatgaggtgatccggctctcgggtatgaacctcatcatcgacgacaacgatcatcaactgattatcaaggtcgcttcgattccgtcagcccgggtgcagatctatttcatcgacaacgacgactatttcgcccgcaaagcgattctccgggatgccgacgaaaactatttcgaagacaacgacgaacgggccatcttcttcgcccggggcgtactcgaaacggtcaagaaactgcgttggacgccgacggtcgtccactgccacggctggttctcgagtatcgtgccgatctatctgaaaaaggtcttcgccgacgacccgattttcaaggaggtcaaaatcgtcgtttcgctctacggcgacggtttcgacaaaccgctggatgcaggaatgaaggagaaaatcgccaacgaaggcgtcaaagacaaaaaactgtctatcctcgacaccccttcatacgaaaacctctgccgttacgttatggagtatgccgacggcatcattctggcttccgatgcggtaacccccgaaattatcgagttggtccgcaacagcggcaaaccgctcctggaataccagtcgcccgacgcagaggactttttcgacaactacaaccgattctatgattcgatccagtaaaatacgccgggccgccgaattggccgccgttctcaccgcagcgggcatggtcttctttacaggttgcacgaaagtggacgaccggctgggcgcaggctaccaaccgggggatcagcagatgaagatcggtctgaaagttttcgcgctcgcacccgacgccgagcggccctatttcgaaactcgactctacaaaaccgactctctcaaggcttccaacctgggagaggggtatttcggtgtgatgcacgacgaaactttcgggcgtcgcacggcaggtttcctgacccaataccgcgccgtagccctctccgatacgaccggattcggctaccagcccattttcgactcgatcgaactcaaaatcaaaatctcgaactacggaggcgacaccctcaagccgatgacgtacaatgtctatgaggtgatttcgaacgattacctcaatccctcgctgacagccccggccggagcaggcagcgtcgccgacacccttttctacccgaccttcgatccgaccccctacctcaaccccaacccggtattcaccttcaccttccccaacggcacgacgacgggaccggccacggagtacgtcaccctgcagcctacgcctgaaggacgggggctcatcaaacgactgatgctgctcgaaggcaagtacaagggcgatatgacgatctaccgcaatccggagctttgggtggactatttcaacggtatttacatcaagccggcccaggaagatccatcgggagaagggaacctgttcgctacgaacctcgcggagtcgggtcttctgatgtacacccgcagccggaacagaaccgacccgacgctgatccaggatacgatcacggccagctacctcttctaccgcgaagacgatccctacggcaatgtttcgatcaacaccatccgacacgattacaccggctccaagatcaatccggccgacatcgacgagcggaacgaacagcggcccctgaaccccaacgtatatgtcgaagggatggacggcgtaatcacggagctgaccctcacggacgccctgttcgaaggaattgaagctctctacaaggaagttacggacgaatcgggcatgccctatacctcgatcgccatcaaccaggcggaactgatgatctacctcgaaaagagcgattacgactgggagaagatcgacgtgggagccattacccccctgctcgacgaatcgttccaacggctgggcctctacgccgattacaagcacgtgctgggcatttccgattactactacacctatgaaaagctctacgcgagccagaatttcgaattgccgtatgggggttacctcaaccgcagccagggttgttacgtcatggatatcaccagccacatgcaggaagtatggaacggctacctgaaatcccagggtgtcgaaaccggcggcagccaaacggagaactccgccccccggacgatctacatcggacccgaagcctacggactcttcacgatgccctatacatcggcacaaggcatggaaaacgccgcaaacaacgcgccgatcaagctgcgcctgatttacacgatgataaaatagcgaagcacctgcggataacctaagtacgaacttaggttatcttgcgttagtgaaaagatactgaatgttatgcaggaaaatttagtaatagtcgagtccccggccaaagccaagaccatcgaaaaattcctgggcaaggatttcgtcgtcaagtcgagcttcgggcatatccgggacctctcgaaaaaagatctcggcgtcaatctggacaaggactacgaaccggtctatgaaattccgagcgacaaacgcaaggttgtcgaggaactttcgtcgctggccaagaagaccaagaccgtctggctcgcgtccgatgaagaccgcgaaggagaggcgatcgcctggcacctcgcagaggttctcggcctgccgatcgaccaaaccaagcgaatcgttttccacgaaattaccaaaccggcgattctggcagccatcgaatcgccccgcacgatcgatatgaatctggtaaatgcccagcaggcacgccgcgtgctggaccgcctggtcggattcgagctatcgcccctgctctggaaaaaggtgcggccccaactctcggccggacgcgtacagagcgtcgccgtacggctgctggtcgagcgggagagggagatcatcgcattccgctcgacgccctactaccgtgtcgtagcacagttctacgccgccaccgatcccgataaaacccttttcaaggcggaactgtccacccgcttcgatacccgcgaggaagcagagactttcctgcgcagctgcatcgacgcccggttcaccgtcgccaaagccgaggaaaaaccggcacagcgctaccccgcgcctccgttcacgacctcgacgctccagcaggaggcgggccgcaaactcggaatgtcggtatcgcagacgatgtccgtggcgcagcacctctacgagcagggtttgattacctacatgcgtaccgactcggtaaatctctcgaagcaggcgatcggccagtgcaaggaggagatcatcaaacttttcggtgagaaatactcatcggcacataattacaagacaaaaaccaaaggcgcacaggaggcccacgaggcgatccgcccgtcgtatatcgagcggcagacgatcgaaggcactcccgccgaaaagaagttgtacgacctgatctggaagcggacggtcgcctcgcagatggttcctgcggagctcgaccgcaccacgatcgtcatcgatatctccggttcggacgcccagttcgtcgccacgggcgaagtgatccgtttcgacggattcctgaaactctactcggaatccacggacgaggagccgggcgaagagggatcgggcatcctccccaaaatggcccaaggcgagagcgtcaatcccgcgcaaattacagccacggaacgcttcaccgcaccgccggcccgctacaacgaggcttcgctcgtaaaacggctcgaagagctcggcatcggacgtccttcgacctacgcgccgaccatcacgacgatcatcaaccgcgggtacgtggtcaaacagaacaaggagggccagaaacgcagctacgtgcaacttacgctgaccggcagcaagatcgccgaaaaaaggcttaccgaaacctacggcaaggagaaaaaccgactccagccgaccgatatcggcatggtggtcaatgactacctcgaatcgcaattcgagccgatcatggactacaacttcacggccaacgtcgaaaaggagttcgaccgcatcgccgacggagagatcacctggaacagcatgatcgacgatttttacggtccttttcataaaatggtcgatcatgcgaccacgacccagacgaccaaaaacaaccagatacgcatcctgggcaccgaccccgctacggggcatacggtaaaagcccgcatcggccgctacggtccgatggtcgaaatcgaaggcaacgaaggggaaaagagccgtttcgcatcgctcaagaaggggcagttgatcgaatcgctcaccctcgaagaggctttggcgctcttcagcctgccccgcaacctggggccctacgaaggggaagatctggtcatcggcatcggaaagttcgggccctacgtgcggcacggcaaatcgttcgcatcgctcgcccgcacggacgatccctatacgatcggctacgaccgcgctgcggagctcgtgcgcgaacagcaggcccgcgccgctgcagcgaacactccgctcaaaaccttcgccgaagagcccgaactactgattaaaaacggccgttacggtccttatatcgcctacaaaggcaagaactaccgtattcccaaagggaccaaacccgaggagatcactctcgaagcgtgcatgaaaatcattcaaacttctaaaaaataacaaaccccaaaattacgatgaaaaaactgctgttactcgcaggcctggcacttatggtgtgctccgcatcggccaagaaacctgcacagaagacccaggaggaaggctacaagttcaccgacttgaccaccgtaccgaacacttcggtcaaagaccagcaccgcagcggcacctgctggtgttattcggctctttcgttcctggaaaacgaaattctgcgggccggcgggccggagatggacctgtccgaaatgtggatcgtccgcaacatgtatttcgacaaaggcgttaaatacgtccgcctgcacggacatctgaactttgcggaaggcggtgccgcccacgacgtaatcgaaggcatcaagaaatacggcatcgtaccccaggaggtctatccgggtctgaactacggcacggagaaaccggtcttcggcgagctcgacgcagcactgaaagcctacctggacgcagttatcaaggcaagaaacaacggggtgctgaccacggcctggcaggacggtctgaatgcgctgctggacacttatttcggcgtgcgccctgaaaaattcacctacgaaggcaaggaatatacccccgaatcgttcgcagcgtcgctgccgatcaaaatggacgactatgtggatataggttctttcacacaccatcctttctactcggagttcatcatcgaggttcccgacaactggatgtggggtacggtttacaacgtaccgctggaagagatgatggccgtggtcgataatgccctggccaacggttactcgatcgaatgggctaccgacgtcagcgaaaagggcttcgaccgcatcaaggcgatcggcatcattcccgaaaccgacatcgacggcatggagggtaccgaggccgagaagtggggcaaattgagcgccgccgagaaagaggcggctctctacaagttcgacaaacccgtcaaggagaagaagatcacgcaggagatgcgccagatcgctttcgacaactacgaaactacggacgaccacggcatggtaatcgtgggtacggccgtcgatcagcagggcaatcccttcttcaaggtaaagaactcgtgggacgtacgtcctccctacgacggttactactacttctcgcgtccgttcgtggagtacaaaaccctgtccgttatggtaaacaagaacgccattccgcaggagatccgcaccaaactcggaatttaatccaaaacacaaaatccaaaacagagccggtggatcaccggctctgttttttattatcgtaaaagctctttctgcgcagatatccctatcgttacgaccaacgcccggaggcacccgacacctcctcgctcctgctccgtattcaaaccaaatcggacgcgtgcaacgatccgtccgagagttctgtcgtatttcccggatcgagcgaatgcccccatcaattcaccgaaagagtctgtaatcgatattttcaaaaaactcagatactccgttccgcatggggccggtgtctgaatttacgaacctggtagaagagcagcacggcggccagcagagaggccgtaccgtcggcaatcggcatcgacatccagacacccagcgtaccgagatgcggcggcaaaacaaggagcagcgggatgaggaacagcatctgccgcgtgagggagaggaaaatcgccttgtgcggcttgccgatatattggaaaaaattggaggtcacgatctggaatccgacgatcgggaaaacgcacaacacgatccgcagcccctcggccgccgtagagatcatccgctcggccgcagctccgtccgcagcatcgacgaagagcatcgccacctgccggggaaagagctgtcccagcaggaatcccgtcgtcgtcacgcaaaccgcacacacgacggtctgccgcaggaccttcaacacccggtcgtaccgccgggcgccgtaattgtaccccacgatgggctgcatgccctgattcagtccagaaacgatcatcaggaagagcatcgccacccgataaatgatgccatacgccccgatcgccacgtcgccgccgtactcccggagcgatttgttcacgacgatcactaccgccgaagcacagaggtgcagcagaaacgaagccataccgatagaaaagatcttgcccacgaccgacacctgcaagcggaaaatcccccgttcgaaccggatgaaacttccccgggaagagaagtggatgagcgaaaccgagagtgctgcggcctgggccagcaccgtcgcggccgccgaaccgcgaataccccagccgaacccgaaaatgaacagcggattgagcagacagttcaacacgacggccgtcagcataatcgtcatggctctcctcggataacccgaagcacggatcacttcgttcaggctcaaatacatatgggtaacgatcgtaccgccgagaatgatctgcatgaaatcgcgtgcataaccgatcgtggcatcgctcgccccgaagaagcagagaatggggtccagcagcaacagacctacggccgtaaaaagcgccgctaccagaaaattgagcaacaccacattgcccaacaccccctcggcagcctcccggcgtccctgtcccagccggatcgaggtgagcgccgcagcaccgatcccgatcaacgacccgaaagccgacgcgatgttcatcagaggcatcgaaagcgccacgccggaaatggcgatcggaccgacgccgtgtccgatgaaaatgctatcgacgatgttgtagagcgacgaagaggtcatcgcgataatcgaagggatcgcataacggacgagcagcgacgaaatccggtcggaacctaaacgaagcggggtgacggcctgtttcatcgttacaaaaataacaataacattcggaataacgccccgaccgaccggatttcgtcggcaagaggttcgatttccggccgcccgatacgaaaaaggatttgtgaaacttccggcaaggaggagggtattcgtcccatttcggcagaaagaaggttccgaatcctccgcagccgcccgacatccctccacgtcggcaaaacggtctgacaacagacgatccgaaatttcaagagcaccgaagccccgcctcgaagctgccgggcggcatccttgcatccggcgccgcaaacaccgccccaagcgtccgaaaatcaactcctcggcggaacctccattatagaacgacagacaccccgaaagtcccgaaccgaattacgcctgcaagcataatcacaccaagatataggctgcaagaagctcctcctccctccgaagtccgatttccaatgcggattccccgcaaatacgacccgtcatccggccttcgtccggatcgaaacgctcgatccgtaaatcccggagcagatcgaggttccgccgccccgaatatttgtaaagcgtctccttggcgcaccagagggccggcaacaacagcggactgtcggacaactgccgctcttcggcagaagcaaagcggactgccgcccgaccgaaatcgcgggcaagcggctcgatatcgacggcacatggacggtcggagaagcagaccgcaacgtatccggggcagtgggaaactccgatatggagaggataattgcatacgacgggagctccgaccgcattatatgcgatttcggcatccggcagacgacggtaaacaatcgaccgccacatcagaaactcttcgcggcgggaagccggcttcaacgccgcagccaaccgaagatcccgttcgggaaccagccgcagcaaccgttcccaggacaaaaccttttcgatacaaaggatattatccatgcagacggactttgatcttgtcgatgcggtgtccctcgatctcctccacagtgaaccgcacaccgtgagccgttaccgtatccccctttttcaggaagtcgcacttcagttcgagcatcagaccggccagtgtttcggcacgccccttgacatcggcgaaagtaccttcggcaatctccacaatgcgttcgaaatcgccgatatgggtcttgccgtcgaacaggtaggtatctttgtccaaacgggtataaaacacttcgtccttgtcgctttcgtccgaaatttcacccactacctcctcgacgatgtcttcgagcgacacgaggccctgcgtcgagccgtattcatcgacgacgatcgccatgtggatcttctggttctggaaatcggccagcaggtcgttgatcttcttgtgctccggcacgaaatagggcctgcggatcagttgctgccagccgaattcgtcgccccggtcgatatgcgaaagcagatccttgacataaagcgttcccttgatattgtccaaatcgccctcgtaaaccggaatgcgcgagaaacccgaccggatgatggtctgcttgacctgttcataggaatccgtgatggcaacggccgtaatatccacccggggtttcatgatctcctgcacctcggtattgacgaagctgacgatgcccgaaagcatcccgtgctcctccttggaggccgtgcgtgtcatatcgatcgcatcggccagttcgccgatggaaatttcctgatggtgggcagcccgctcgctgatacggtttccggtgcgcaccagcacatacgacaacggataaaaaatccatcgcagcaccaaaaggggccgcgcagcgaaaccggcgaaccgcaaaggaatcgtctgcgccgcgactttaggcaaaatctccccgaaaagcagcagcaggaacgtcacgatcaccgtcttgaaaagaaactcgaaacgggcgaaagtgaaaagcgaatcgatgatctccgaagagaggataacgataccgatattgaccagattattgactaccagaatcgtagccagcagcagatcggccttgcccagcagattcagcatccgccggcaaaccggcgtatcgtgccgccggatcttgcgcacatcgttacccgaaagcgaaaaaaaagcggtttcggagccggaaaccaacgccgaaaccaatagcaggaacaaagtcacacaacacagcaccacgacatgaaacgtcatgccgtgatagatgatggccgcagcactatcttccaaatccaatccgttttatgttaatcgaacagcgactcggagcggttttcctccgcacgctccgcagcacccttctcctccttaagcacctccttgcggcccgcaggcatctcgacgatgaactgcgccttacgcgactgataagccggtttggcgaggatctggtcgatattgctgtaacgggtcgatttctcgcccaggatcacctgctccagagggcgtgtctgcggagtggccttgccgggcttgcccaccggttccaacaccggctttccggcggggtcggcaccttccgggacaggcttgacgatccgtgcgggcggaatgaccgtcttcatcatccgcttctcctcgtcgccctcgaatcccgtcgccaccactaccagctcgatggcattgcccaactggggtttctcgctcgtaccccagatgatattggcgttgtggatatttccggactcgtcctcgacgctggcatgcgcctggatatactccagaatccgcaccacctcctcgtacatcagctcttcggcattggccaccgagatattgagcagaatgttgcgggctccggaaatcaggttgtgatccaacaggggcgaatgcagcgacgcttcggccaccgcctcggcccggttgtcgccttcggccgtcgctacgctcatgtgcgcgcggccgctgtcccgcatcaccttcgacacgtcggcgaaatcgacgttcaccaggtcgctctcgaccgtaatgatctctgcgatgcccttcgcagccgaagccaggatgtcgtcggccttgccgaaagcctgcttcaaggccagacggccgtatatttcaagaatattctcgttgttgataatcagcagcgaatcgacgttctgacgcagctcctcgatgccccggaacgcctgttcgtaacggatcttgccttcgacggccagcggcgaagtgacgatgccgacggtcagcattcccatctccttggccagcttggcgatcaccggcgaagcgcccgtacccgtaccgccgcccataccggcggtgatgaagaccatcttggtccccgacgcctcgaaacgctggcgcaccacatcaagcgactcgatggcggccttgcgtccgttttcagggtcgttaccggcgcccaatccctcgctgccgagccggactttcagctccacgggactcttgtcgagcgcctgctggtcggtgttgcagaccataaagtccacgcccttgatccccaggttccacatgtgattcacggcattgccgcccgcaccgccgacaccgactaccatgataatggaaggattcgtgcgggcagcggccaactgggtgattacatcgtctgtcatatcgtttcgtttctcttgtcttaatcgttaaatctcctcgtcatcggcggcattgaagccctcgttgatcttgtcgagcgtccgcttgaaaatactccgccagttgcgttcctttttcaccggctcctgcacgggagcctgaggcgcgggctcctctccggcatcgtccacctcgggctcgaccgctgcggattccgcacgggcagcctcccgacgcgcatacgccgcattgaccgtttccgcagaaggccgtgtcggcgcatagggctgggattgcggccgcgactggggctgcggaggctggaatcccggtgcaggggttggcggcacgggacgacggggcgaaaggcccgccttgtcctcgatcacgttgcacgaacccatgccggcccccttgagcaacagtccgacgaccgtggcgaacgcagggttcgcaaccgcctcgcgcgaatcttcgctgatgcctgtttcggcgcttgcgatacgaacgtccatgccggtcacacgacggaacaattcgtctatatccttgagtcgggccgagccgcccgtcagcacgatgccgtaggccaaccgctcggcataccccgaatcccggatctcctgctgcacgaattcgacgatgtcggtagcccgggcctcgatgacggtggccaggttgcgcagcagaatatccttggcttcgcgggccgtgcgaccgctcacgcggatcagcttgtcttcgggagcgagctcggcgacagccgaaccgtatttgcacttgaggctctcgacatgtttctcgggaatgctctgcgaacggatgtcccggttgatggcgctcgctcccatcgggatcgtcgccacgtaacgcggcacgccccggtaataaaccgcaacgtcggtcacgcctccgccgatatccacgacggccaccccctcctccttctcatcggaagagagtacggcttcgggcgtcgccagcgcattggggaatacccccaacatacggataccgagccgccggagagccatgtcgagccgttgcagcggcgtcttgccgcaaagtatgaagttgaaagtcgaagacaaccgcttgcagaacgaaccgaccggattgcgcacctcctcggcatcatccaccatataatgctgcggaatacgctccatgatcgtttcgtcgtcgggggcctggacgttgcgcatacgatcgaacagggcatctacatcgccctggttcaccccgttctggggatcgtaggtaaagacgtggtcggtatggcgggcacaacggacgaactcgcccgaaatgccggcataagcctccgtaattcgaacgccgagcgtcgattccacctcggcgacagcctcccggatggcattgcccgcctgttcgatattatcgatccggccggccttgaccccctcgaccggtttggaaacgacggcttcgataccgagcgttccgtcttcgcgtttcgacccgacagcgaccaccacgttcgaagaaccgaggtcgatggctaccgtataactctttttttccactgtgctctatctattttttcattgaatcgtttcccagcctcttccctgcccggcatattccgcaggcagatccggctcctgcatctcgaaaaccttaccactccgtacagacgacctgcccggcgtacttcacgttgatcgtccggtaccggtcccacccggcttttccgagtccctcccggtaaaaccgcagcaacttatccagtttctgctcggcatcgtccaagcggccgaaaaggatggtatagttgccgctccggggcgtaagttccaagtcgatagccccgctttcagtggtgcgggccgttatctgaacgatttccgaccgccagaaatcgtcgttttccatccattttacaaaggtagtcagtttcgagaaatcttcgtaccttttcgccaaaattttttgtcggcgacgctcggcttcctgtttttcggaaattttgtcgatcgccgactgaatcacctgagcctcatagcgatatttgcggcgcaactgctccttgcgcttgcggagttcccgcacccgctcgccgaaggactccgaagattcgaaccatctctttttaatcagcatccgccgcagcgaacggatattttcatcgttcttcagctcccgtcggtaaagagggtatttttcccgttccaactccgcgatcttatcgtctatctgttgcatctgctcccgcctgtaatccgccgcataccccacataggaggccgggaacgggggacggtaggtacccgtaatcaccggcacataaaccgacgaggcacggggcactgcaaacaggtagccctcctcggtcacgtacgaattatagccgtcgatcaacagccgcatcagaggcgtccgctgccagacggcgacatgcagcacgcccgaataggaaaccgtaacccgggcgtcggcgacgaatccattgcgggcgataagccgctccagcgcatccagccgcacggcaccgatcttctcgccgacggttttgataccgctgcgggcgagccatccccgaacggtagcttccgacaccagccgcaactgcgaggtgctgtccaccacttcgacctcgatgcgcgtcacaggctgctccgcacgatgacggcgcactttgcctcccgcatagagcaaataagcggccacaccgccccaaagcagtgcaagaagcgtatatttcaggtatttcggcattcgtcaatggttgaatctcatcccggcgtttacttcccccccccggtacggccgcgacggacacggcctcgaaaaaaacagatcgtccccggcagacggcgaatcaggctttttcccgcaatttttctgccagtgccccgcagcaggcgtctatattgcccgcgccgaagctgacgactacatcggtatccatcgcagccaccttttcggccaactccgcacggtcgcagatcgtccagggtactgtcagcagacggccgatcatctcggattccacccccggaatcggctcctcgcgggccggatagatcggcagcagcaccacccggtcggcatgcgagagcgcctcggcgaactcgcggtagaaatcccgcgtccgggtgtagagatgcggctggaaaagcgccgtcagccgccgccccggaaacatcttcttgaccgaagtgatcgccgccgccaactcgcgcgggtggtgggcgtaatcgtccatataaacctgccggggcgtattgacatagaattcgaaacgtcgcttgaccccctcgaacgaggccagcgcctcccgcagacgctccgcatccagcggctcgccgtcccgctccgacgcgcaccagagcgccgccacggccgctacggcattctcgatattgacccagccgggaatacccagcgtgcacccttcgataacgccgccgggcgtcaccagatcgtaccggtagtggcccccctcgagcagcgtcacgttacgggcgtaaaaatcgcacggctcgtcgtacgaatagcggtaaacccggataccggggttcccgatcttcagatcgacaccctgcttgacgaccagcgccccgccctcgcggatctgtccgacgaactgcgaaaaagcctcgcgcaatgcctcgtgcgtaccgtaaatatccagatgatcggcatcggccgaggagaccaccgccacgtcgggccacagccgcaggaacgaacggtcgaactcgtcggcctcgaccgccagacgccgcccccggccgagcaccaggttactcgaaaaattccgggaaataccacccaggaaagcgcttccgccgcccgtcacccggtggttgagccatgccacgagcgtcgtggtcgtggttttgccgtgcgtaccggccaccgctatcacgaatttcccctgcgaaaggtaccccagcatctgcgaacgcttgacgatctcgaacccgttctgccggaaccagcgcaattcggcgtgatccgccggaactgccggcgtatagaccacgatcgtcgtggccggatcccggaaatcagccggaatcagcgccggatcctcctcatagtgaacaactgctccttcggcctcgatctggtccgtgagatgcgaccgcacccggtcgtaccccgccacccttcggccttcgtggaggaaataccgggccagagcactcatgccgatccccccgattccgagaaaatatacgttgaactgcattcgttgtttttccggctcggcagagtccgaacagattcggcgctcccctcgctcatcgaaaacattggaaaactctttcattgatcgatttcttctttattacacccggcaggacgatttcacctgccccgctcaggcattttccccgctcggtcgctcccggcggctctatttcgactgcggcaactgtctttcgatttcgttcacgatccgctcggcggaatcggggatggccagcgcctcgatattgcggctcaactcggacaaacgggccggatccttcaacagcccgaccacctcgtccatgacccgggcgaccgcctcggaatcggggatcagcagtgcagcccccttgtcggccaacgcccgggcattcttggtctgatgatcttccgccacgttgggcgacggcacgaaaagggtcggcttggccaccagacagagttccgacaccgtgcaggccccgctgcgcgaaacgaccagatcggccgccgcataagcgtaatccatgcggtcgatgaacggaccctgccagatattcgccgtaggatgctgcgccagaaactcgcgcatctcccgctcgtaatatttgcccgtctgccagatcacctgcaccggcgaagtaccgccctgccgcagaacccaggccttcatcatctcgttgagcgtccgcgtaccgagcgacccgcccacgacgagcagcactggcaaatcgtcccggaagccgaaatgcgccagcgcctcgcggcgatccgcacccgctttcgaaaaacgtccccgcagagggttgcccgtcatcacgatcttctccttcgggaaaaagcgttccattccctcatacgacacgcagatcgtgcgggcacgcttggccagcagcttgttggtgactcccgcataggagttctgctcctgaatcacggtcggaatccccatccgctgcgccgcccacagcaccgggccgctggcataccctccgaaaccgacgaccacatcggccccgaagtcgcggatggtgcgccgggccttgcggatgcttttgagcaccttgaaaggcaccgccaggtttttcaaatcgaagcggcgctgcaagcccgcaacgggcagaccgacgatccggtatcccaatgcaggcaccttctccatctccatcttgccttcggcaccgacgaagaggatctcgacttcctccccgaagcgccgtcggagcgcttcggccacagccacggcaggatagatatgaccgcccgtgccgccgcccgaaacaatgactcttttcatattttattttcgtttccagcctcggcagacgcatccccgccggcataaaattcctgatttgtatccgaaatatctccgaacgaatccttaccgcttccgctgcgggttccggccccgccccgcagacacagccccagcgccacacccaccggcagccacgcgagcaccgcaccgcgcaacagtcccaccgctgcaccgagcccgatgcccagcagcagcaatccgtccctcctttccggtttccacttcttcatcgcaacatccccattcgattaccggccccagcttccccggtcgagcgaacggtagttgatcgcctcggccagatgcgccgtaccgatgtcggccgtcccctccagatcggcgatcgtgcgggccaccttcacgatccggtcgtaggcacgggcggaaagatcgagccgcaccatcgcccgttcgagcagctcccgcgcctcctgacccagcgggcagaactcgcgcaacattctggcgttcatcatggcgttcgtatgcacgcccggcaccccacggaaacgctccgcctgcacctcccgcgcccgaatcacccgctcgcggatcgcggcgctcggctccgaaggccgcacctgcgaaatctccccgatagccaccggcgtcacctcgacctgcaagtcgatgcggtccagcagcgggcccgaaatacgtcccatataacggtgcaccgcacccggcgggcaggtgcactctttggtcgggtggttgtaatacccgcagggacagggattcatggccgctacgagggtgaaattggccggatattccacgctgtatctcgcccgcgaaaccacgatcttcttatcctccagcggctgccgcagcacttcgagcacgctgcgtccgaattcgggcagctcgtcgaggaacagcactccgttgtgcgccagcgacacctcgcccggctggggcgactgtccgccgccgatcagcgccacctgcgaagtcatgtgatgcggcgcacggaacggacgctgcgagagcaatcccctctctgcgcccaattttcccgccacggagtgtatcttggtcgtttccaacgcctcctcgacgctgagcggaggcagaatcgtcggcatgcgccgcgccagcatcgtcttgcccgaaccgggcgcaccgatcatcaacacgttatgtcctccggccgccgcgatctccagcgcccgctttacggccgtctgtcctttcacgtcggcgaaatcctcggcataggcactctgcgccgccaaagtcgcctcggcatccaccggcaccgtcgcatcgaatctccgctccccgttcagcagggcgatcacctcgcccagggagtgcagaccgtacacctcgaccccctccacgaccgccgcttcagcggcgttttcggccggcaccacgagccgccgcaacccctcgtcccgggccttgaccgcaaggggcagcacaccccgcacgggccgcagcgttccgtcgagcgagagctcgcccgcgaacatcgtcgtcggaagcaactccccgctcacctcggacatcgcggcgagaatccccacggcgatcggcaggtcgaaacccgccccctccttgcgcagatcggccggagcgaggttcaccacgaccttgcggcccgacatcttgcgaccggtattctcgaaagccgcccggatacgctgctcgctctccttgacggcgttgtccggcagtccgaccaaatagagtcccagaccgcctccggtgagattgacctcgacggtcaccttcacggcgtcgatcccggcaacagcccctgcatacgtactgacgaacatattatcgatctttcactatacaatcaagcgatcttcctccagccccggtccgaatttccggacccgcacctccagagtggcgcccccgccgcgaatgcggcaaaaccggacgcggaaaccggagccggctccgctaaaacggctcctcctcgttcaggttcacgggcgcccccgacacaccgggcgtaaggaactcctcgggcacgccgccgaagccgcccagcccggaattggaaccgctcgatacatcctcgtactgccccggcgcagggcggctgcccgcctccggcatcagcgtttcgtccacatcggcgaagcgggcctggtccttcaggaagcgcagattgacatccgtgaccgcaccgttacggtgcttggcgatgatgatctcggccatacccgccgtcggcataccgttctcgtcctgattgataccgtaatattcgggacgatggatgaaagccacgatgtcggcgtcctgctcgatggcccccgattcgcgcaggtccgaaagctgggggcgtttcgagccgccgcgcagctccgtagcacggctcaactgcgagagggcgatgatcggcacgttcaactccttggcgatggccttcaacgtgcgggagatgaaagccacctcctgctcgcggttgcccttcgaatcctgcgttccgccggtcatcaactgcaaatagtcgatgatgatgatctggatgtcgttatgtatcttcagacgccgggccttcgagcggaactcgaagaccgacaacgccggcgtatcgtcgatgtaaagaggggccgcccccagcggcttggtcgccgactccaggtggcgccactgctcgggcgtaagacggccgctcttgatatcgttgcccggaatacccgtttcggcgatgataaggcgcatcatcaactgcaccgaagacatctcgagcgagaagaacgccaccggacgttcgtgatcgacggccatgttgcgggccatcgacaacacgaaggcggtcttacccatcgaagggcgtgccgctacgatgatgaggtccgacaactgccagccgagcgtcacgcggtcgatggccatgaaacccgaaggcacgccgttgaaggccgacgtgttcttggatgcctcctcgatctgcatcagcgccttggccagcaaatccttggacgactgtaccgaacgcttgacgtgaccttcggccaccttgaagatttcgctctcggcatagccgatcaactccgtcacgtcggtcgattcgtcgtacgaacggcgctggatctcggtcgcggagcggatcagctcccgctgcacgtacttctgggcaatgattttggcgtggaactccacgttggccgccgagcccaccttctgcgtgagctgcgccaggtacgacgcaccgcccaccttctgcaactccttgcggaccttcagccgctcggtgaccgtatagaggtcgatcggtttgagctcggtcgagagctcctcgatcgcgcggtagatcgtctgatgctcttcggtatagaaagcctcgggcgtgatgaactcctgcacggtgatgatcgaatccttctcgagcatcagagcgccgagcaccgcctcctccagttcgacggcctgcggaggcacgttgccgggggtatcggtcattgcagcaaacgcttcgcggttgcgcgaagcgggggtatattctttagccattcattacgtggatttcaactttcaaaaatagacaaacggggcgacatatcaaaacgccccagaccccgttttgtcgaaaaatctgtttacaaccgaacgatccccggcaggggattctctcgagccggaaagatgtcgataaaaaggggctttctgtcgattcttttttacggtcccttcggtcagcaaaaggcaccgaccagaatcggcacgcacacctccagtacgatgccgtgcaggatagccagcggcaccaggtcgctgcccgaataacgggcgatcgaaggcagacaaacgtccatcgaggtcacgcccgacaccgagatcggggccagcggaccgccccagcgggcgaacagcggcattccgaacagggcgatcatctcacgcacgacgttggccagcaaagcgaccgtcgccaactcggcggcgccctgcacgccgagcgtcgcgctcttcaagtcggctatcagcaccgacgaaagcgaatagtagccgaaaccgctgcctacggccagacagtccgtcaggctgaatccccggagcaccagcacgccaagcgccgaaaagagcagggtgccgacgatcgtacaaagcggcaacaggagcatccgccagttgaacgtgcgcagcatatagtgcaggttgtcgccggccccgagtcccaagccgaccagcaccaccatcaccgaaagaataatcatcggcagatcgggatccaacagccatgtcgggacggcatcggcataaccgagcgccacaccgactgcaaaaaaaacgaaaacgatcagactatctctcatcgctccctcctttccggaaaaagtaacgccgaacgacgaacaccgccgcgaaactcccggcgacgccgaggcaggcgatcacggcggcctgccagccgaaacgtccgaaattagcgatcagttcgcggttggaaccgatcgtaacaccgaaaacgaagagcagggcccacacggtaagcgatactccccgctccagcctggccacaaacgaccagttgcgcagcagatagcccgctccgattccggcaaacaacagcaaaacgatacgaaacatagctcaatcgacagttaaaaaagcccgacgagatacattgcaccccgccggaaaaatattataaaacacaaatttcgcgctgcaaagatagcgaaaggtaagtgacaagccaaacccgttcggacctggccggagcaaaatccaaccgaaacacctcattatcaatgcaaagactactcgatcgaagttatcgatccaatccgaaatggcggcgcgaaacggccagtgcagcaatgctgacccgacagtcgggcaccgcacgcaggagagcttcggtgcaggaaagcagcgtcgaaccggtagtcaccacgtcatcgaccagcaacacgtgccgtccggccaacgctccgggccgcgcgaccgcaaacaagtcgcgcacgttctcccagcgcccggccgaagaacgggtcgtctggctcgggttgttgcgcaggcgcctgaccgcccgatcctccaccggcactcccatccgggaagcaatcccctcggcgatataagcagcctgattgtacccccgggccagcaaccgccgggtatgaagcggcacgggaacgatgcagtccacgcttccgtacagtccgctgtcggcaaggttaccgccgtaccaggcacccaggtcgcgggccgtgcgccagcggttgtaatacttgaaaccatgaatggcccgctgccagggactgcccgcaacgaaccagagaaaagccgaggcctgcacgatgggaaactcgttgcgcagccgctcggccagcggattgtccgcacggcgccagaatccggtctggggtgccaacgtacggcacatcatacagaaagcaccctcgccctcgtgcaactcgccgccgcatacgggacagacaggcggcagaaaaagcccctttatatcattgaggatcgacatcgcagagaatcgtaacgcctttgcattcgggacttttgaccacccggtcgagaatcccgcgcaccgcctcgcgagcccgggccagcgaagcccccgcctcgatcttcagcagcagggtcgccagatactcgccccgcacccgatcgacgggcggggccgtgggtcccagcacgcgtcgcccgaaccgttcgcgcagggcggcggccagggcgttggccgcacggcgcagcgtcacgggatcgcggtgacgcaacaacaggttcaggagccgtgcatagggcggatagaagaacgccttccgctcggcgagctgctgacgagccatcgcctcgtaatcgcccgcaatcacctgttgcaagacgggatgtcccggctcggcggtctggatcacgaccgttccgggattttcgcgccgaccggcgcggcccgccacctgcatcagcagttggaacgcacgctccgccgagcggaaatcgggattgttgagcagattgtcggcgttgagcacaccgaccagctccacgccgccgaaatcgaatcctttggtaatcatctgcgtccccaccagaatatcgtcgtcgccccgggcgaaggcctcgacgatctgccggaaagcacgctcggaggtaacgctgtcgcggtcgagccgggcgacccgcgcctcggggaaaacgcgggcgatctcctcctcgaccttttccgtcccgaagcccatcggcacgggttcggtcacccggcaatgggggcacttggccggaacaggctccgtatgaccgcaatagtgacagaccatacgaccgcttcccttgtggagcgtgagagtcacattacaatccggacagcgggccgtccagccgcactcccggcactcgacatagggtgcgaaaccccgccggttctggaaaagcatcgcctgaccgcctccgccgagggtctcctccatacggtcgagcagcaatttgttgaaatgggcatgccgctcgccgcgtttcacggcacggatcgtatcggacacgaggatctgcggcatccgcgacggtccgtaacgctcggctagtaccacgctgccgtattttccggtcgcagcgtttagataactctccagcgacggagtagcgctgcccagcagcgtacggcaccccagcagtcgggtcatcagcacggcgcagtcgcgtgcctgatagcggggcgccgggtcggtctgtttgtaactgggatcgtgttcctcgtccaccacgaccagctccaggcggcgcagcggcaggaagatcgccgaacgggccccgatcaccagctcgccgcccgcagaatcccgcaggcggaggtaaagctccgtacgcttgcggtcggtgagtttcgaatgataggcgatcacccgctcgccgaaaacctgccggagccgatcgaccaactgggccgtgagagcgatctccggcacgagcagcagcacttgtccgccccgggccagcacctcggcagcgaagtgcatataaatttccgttttgcccgaaccggtgacaccccgcagcagcacggtcgcgcgatcggcaaacacggcacggatctcctcggcagccttccgctgcgcagcggaaagcgtcggcagacgaaactgcgcaccgccagtcaccggaccgggtgcgacctcccgttcgatacaggtcaataacccctttttcaccaggagagcgagagccgtccgatcggcggcgagtcggctccgggcgacttccgccccgtcgggcgcaagggcagccaactcctccagcgcctcccgctgccggggggcacgacgccccatacgttccagcgcggcggccagcccgtcggcggtgagcgcttcgccggccagggccacgaaccactcccggcggggccggaactcgtcggcagcgaactcctcctcgccgtgtccgctcggcttcatcagcgacggcagcgccacgcgcatcacctcgcccagcgagcacatgtaataatcggcgacccactcccagaaacggcgctgccgctcgtcgagcagaggcgtgccgtacaatgcacgggagacggtcttgacagtcttgaaatcggggcgccggtcgtgcagccgccagacgatgcccgtgtagatcttcgatcggccgaaaggcacggctacggccatcccctcgcaaagcgtcacgccttccgccaccgcaaaggtgtagagaggctgggccagaggaagtacgatgtcggcatagcgcatggtcgtagcaggatcgaaaaagagtgctttcaggctgcggaaccgaccggcccgtccggagccgcgccgcaaccgcaaaacgacggaatcaattcggtttttcttcgggtaaagttacgcattattcccggaaaacaaatactccccgccggatcgacgaggagtattatttcaaatcaaagaagattccctaattcttcttcataccgttgagcataccgccgtcgatgataccgaagccctgcccgtaaacacccgttacggaagccaccgaaacgaacgctttgggatcgagattgcggacgatcttgaggatgtcggccgtttcgcgtttgcggcaaatgaccatcaccacctgcgacgactccttcgtgtaccatcccattccgttgagcatcgtcaccccgcgatgcgccttctcgacgatctccgcagcaatacggtcgtgctcatggctgatgaccagaatctgattcgactgctggttgcccgccagcaacgcatcggtgctcagaccgaataccgccgtcagcaggaagccgtagatcaccgtctcgatgccgttgcccaccagcagcgatgcacagatgataagcgaatcggtcaccagcacgacacggccgtagttgatcggatgatacttgttgatcagcagcgccacgatatccgtaccgccggtcgaaccgccctgacgaaaacacatatagatacccacaccggacagcataccgcccatgatgaccagcagcagcggttccagattaccgaacaggctgatcgcatcgggtgggataacgcccagttccgccagccacgcctgcacgccgggcagcgtttcctggaaaaagttcagcgacgcaggaagcacgatgatacagaaaatcgtcttgataccgaaattccaaccgatgatgaaacccgcgaacagcagcagaataccattgacgatgaacgccatcgtaccgatgttgatctggaagttgaacaggttttcgatcgccccgcacaacaccagcgccgcacccgtggcaccgccgccggtaccgtgtgcgggcagaatacaggcgatccacgcgaacgtgtagaggagaataccgatcgtcatcacgaaatattcccgtactacgcccataatcgtcccgaaagttattttttccttcaacagagtcatttttccttgaacaattaaggtttaacggcgcaaaggtataaaaatttcgccttgatacgcgttccgtgccgttaatcttttttcgagcagggaccagagggtggaaacccgcgttaaatgccactgtgtcaagtggtgaaaccccatcggcacttcgctggcgatacgctccacagccatatcgggacgcagccgccgcaacacctcgaccaccagcgagagatactcctcggaggtacgcaggcggaagcggccgggctcggcgtcgtattgggcggcaagggccgttccccgaacgagctgcaactggtggaacttgaccgtttcgagcggcagggcattgatccgctccacctgccgaagaagcatttcgtcgtcttcgccgggcagccccagaatgaaatgggccccgacgtgcaacccccgtgcggcgctcgccgcaatagcctgccgggccgccgcgaagtcatggccgcgacggacggcccgcaatgtttcgtcgcaggtggattcgacgccgtattcgaccgccacatagtgtttccgcgccagctccgccagcaaattcagcttctcgtcgtccacgcaatcgggccgcgtgccgatcaccagtcccgaaatccggggatgatccaacgcttcggcataaagctcccgaagtcgcgcgacaggagcgtgcgtattggaaaaaggttggaaataggccagacaaagcccttcgtcccgccctcgggccgcatggaaagcgattccctcgtcgatctgccgcgtcaggctcttccggggcgaacagtaggaaggggtgaacgccctgttgtcacagaacgtacacccctccgatccgatcgttccatcccggttgggacagctcaagccggcatccaccgcgatcttacgcacccggccgccgaaatgtcgccggcaatacgccgcgtagctgtgccagggtcggccgtcgccccaagaatagacccgggtttccattcggaacgctacaagccccaatccgacggattgtaggtatccttcggcgcattcggcacgttggcaaagaaggtaaagcccgtcaatcgctcgatttccgccaccgacatcatatctttggcctgcggcttgtgccctttatccatgttatgacgcaacacgaaggcggcgcacttcaattcgctcgcggcacaatccatcaccgattttttcgtatttccgttcttggtccgcagcagcaggtagtagaacatcgaaggccggctcacgtcgctgcgtccgccgaaatcgattttcgacgaagtacaactcttgccgtaagcatcggtgaaaggttcgaaataggtgcctaccacgatataagtcgtatcggcgcaaacctgcgcatcgacaaaactttccagattgttccatgccccgcctccggtgttgaaactcgaagagaactgcggcgctatgttcgagtagtagaatacctgcttgttggtggctttagtgacagtgcgttcggccgagccaagcatgtgtcctttgttacagccaccgccggtatcggtgctgctgtactggaggttggacggaatatccggatcgcgactgtaagaggaacggccggaacttccattgtaacaatcgtggcgcggagcggccacccagaccggacagtggtgctcggcgctgaagcagaccgtataattgcgggctttctggctgccgacatagaaatccggacagatatgatgcgcatagtagtagtcgctgttctgcacctccaccggcaactcggcccagccggtacgatagacgttttccggggggggggactgttccgctctcagtggtgaaagtaccctcctcgctccgatactgcttgccgccgatcgaggcgtacagatggaacgtataggtggtcgcggcactcaatccggtaatggccgcacgcttatctcccgacgaagccgtcaccgttttcgtggcgtaatccgtttcaccggaggctttgtaagcaaatcctacttcgatgccgaccgtttcttcgccttcataggtgaagctgcccgtcaggatggccgacgaagcggtcacatccgtcgcagcgacgggaccgaactccggctcgggattttcacccgctttaagggtcgtgaactgcgcaacggcgctcgtataacgctcgtcgccgataacgacatacgcataaaaatcgtatttcgtttcgggttcgagtccgttcagctcataagtcaggggcgaagccgtcgaagcagccttcacctcggtatattcctcctgcgcaccggccttatacccgaagccggcttccgcaacatcgccgtcgccttcgtactcataaacgcaggcaagcgtcgctccggtcggagaaaccccggacgacgaaggcgtttcgaactgcggagctcccggttgctcgccctccttcaacgtggtgaaaacgacccgttcgctggtgtaattctttccgtcgattaccagataggcatagaactcgtaagccgtttcaggcgtcagctcctccagacgggccgacaacgaagagtcgtccggcgtaatctctaccatagtatatcccgtttgggccgatgccgcaggcttgtatccgaaaccggcttcggcaatatcggccgcatcaccagtatatagataagcgcacgcgagcaatgcgctcgtagcctgcacctcggaagccgaaggcttgccgaactggggcgtcggagccggaggcacctccccctccttgagggtcctgaacgttttcgacagcgacgcattgaaccgctcgccgcccaagacggcataacagtaccaacgatattcggtgtcgggctttaggccggtcagggtctgccgggccagaccgtccttgaaattcgtacaaaccacatcgacgtactccccgcccgcttcctggtaggaaaagccgacttcggagatgggcacttcgcccttcgattcgatgttggccgccacgaccgcactcgtcacatcgggctgcgcgtcgatcagatcgaaagtcggacgcacggccggcgcaggcgccgtatcgtcactttcgcaggctacgatcgccagcgacagcaaagcgaccatacacaaaaaatacttcttcataacaaactttttatatctttgacatagcctcagataggatccgattcggcaatctctgcgtgcaagcccgcacgattgcgctcatctttcactatctttgaaataactgaagtcattcgcgttgtcgggagtcgatccagatcgtcaccggcccgtcgttcaccagctcgacctgcatatcggctccgaactccccggtggcgacttcgcgcccgagcgcacggcctacaccggcggcgaaccgctcgtacaaaggtcgggaaatcgcttcgggggccgccttgatataggacgggcggttgcccttacgggtcgaggcatgcagcgtgaactggctcaccaccaatatttcgccgccgacctgccgcacgtcgagattcatcaccccgttttcgtcgtcgaaaatccgcagccgggtgagtttacccgcaagccactcgatatcctcctcgccgtcctcggcttcgataccgacgaaaaccaacagccccggtccgatggccgatttgaggattccgccgatggaaaccgacgcacggcgcacccgttgaatcaaaattcgcatggcaacaatgaaaattgtcgggcgaagaacgcccagagattatcttctttcggcacgggcgctgtcacgacgatccgctcgcgccgcacgggatggatgaaatcgacacggtacgaatggagcgaaatgcctccgtcgggattcgaacggcgggccccgtatttcaggtcgcccttaatcggacagccgatcttcgagagctgcgcccggatctgatggtggcgccccgtcagcaaatcgacctccaccagcgtataacgggtactcgcccccagggtgcggtaacgcaatttcgccagttttgcatcgccccggggcgcatcgagcgcccgcgaacgattggttttctcgttacgcaggatatagtgggacaactccccctcttcgggatcgggacggctctccgtaagcgcccaataggtcttttcgatctcgccccggcggatcatctcgttcaggcgggcgagggctttcgacgttttggcgaaaatgacggctccgctcacgggacggtcgatacggtgcaccacgccgaggaacacctcgccgggcttggcatcgcgccgccggatgaactccttgatctgccgttcgagcgcatcgccgcccgacggatcgggttgcaccaggtcgccgcaccgtttattgacgatcaaaaggtggttgtcctcgtacagaatatcttcgggagcgaacatcggaaacggagcgtaactgcgaagcagattataactgaaacgtgaaaggaagcaaccgcacggccgaatccaccaccgtggcaccgcccgcaccggacatgatgatgcggatcggcgatccctggcgacgctccgcatcgagcagcacctggcggcactgtccgcagggataacactcccgctcggacggctccgaagcaatggccagcgcctcgatcggatcgtcggcatggcacgctccggcatggaacagcaacgaccgttcggcgcacatgcccgcaggaaacacctcgctctcctggttgctgccgcagagaatcttcccgctgcgcagacgggccgcagcgcctacccggaatttggaatagggagcgtacgcccgggcgacggcccggcgagcctcctccaccaactcccggtccccggcgggcatcccctccggagagtcgtagtgctggtaatcgaaactgaatctgttctccataattccttgcttttgaaaaaagggaaagtggtcaaaggtaaaccgatttttcgggttatccaaaaattcggcctgccaattcatttccgacgataaccccgattattcgaggacgaacttggtctggacgttatactccagcttgatcgttttgaaatcgagcgaaggctcttcgggcgcacccgcttcggcgctgtcggccatcatcgccttcgaacgtaccatcatcatattgtcgtaatactgcggagctacgtcgtaattcgaatcgtagatatagaaacattttccgatcttctgcccgatctccccggccagcgcttcggccgacgacttggcgttgcggatggcatccaggcgcacctgctccttcagggagtcgatgtccgaacgggtcacgcgtacgataccgacgttcgagatgcccagatcgcccagggcggcggtcacgtcacccacttcggccgccgaatggagcagcaactggtatttggcagtggtcagcgagctggccttcttgtagaaatcgctcgacatattggccaccttgagctgtttctcgacatcgacgcccaacttcttcagggcgtcgatcatctgccgctgctgggtttcgaccgtaatttttcctttcgactcgcgctcgttgattacaatcgacagatagaattcatccggcgtaacctccatctgggaacgtccgttcacctgaatataactcgggaaagcctcctgggtttgagcgaacaccggcgcagccaatacgaccgccgccgctaaaatcatccattttttcatacgtttcattcgtttttgaaatagtactgcaaatataacgcccgaacaggagccgatagtataaaaaccgccccggaacaggagccgcctaccggcggacgagcttcaccacgttctccacgtggtgcgtatgggggaacatatcgaccggctgcaccgcctcgacgcgatacgcgccgtccatcagggccaggtcgcgggcctgcgtagccgggttgcagctcacatagacgatccgctcgggcgccgcccgcaggatcacgtcgatcaccggctcatcgactccggcacgcggcgggtcgaggatgatgacgtcgggacggccgttgcgccgtatgaactcgtcgctcagcacggctttcatatcgccggcatagaacaccgtattcccgatgccgttcagcgtcgaattgatgcgggcgtcctcgatggcctcgggcacgtactccacgcccacgaccttcgcgcaccgcgccgcacagaagttggcgatcgtacccgtgccggtgtaaaggtcgtataaaatctcttttcccgtcagggcggcgaagtcgcgcgcgaccttgtaaagttcgtacgcctgcgccgaattggtctgatagaacgacttgggtccgaccttgaactgcagcccctccatccgctcgatgatgtgatccttgccccggtagcagacgggttccaggtcgccggtggagtcgttgaacttttcgttgattacgtagaacagtgacgtaatttcgggaaaagcggccgccagatggtccagcagggccgcgatcttctcccgctcgtcggcatggaaaaccacgatcaccatcacctcgcccgtcgaggcggtgcggacgaccatgttgcgcatcagcccccggtgctcgcgcggattgtggaacgtatagccgtgttcgaggcagaaacgccgggtttcttcccggatcgcattcgacggatcgggctgcaaccagcatttttcgatgtccagcactttgtcgaacataccggggatgtggaatcccagcgccggggcatcggcgatctcgcccttttcggcgatctcctcgtaggtgagccagcgccgctcggcgaaggtgaactccagcttgttgcggtaaaaacgggtttcggccgagggcaggcagggcgcgatttcaggcagctcgaccttaccgatacgggcaagctggtcgcgcacctgatcggtcttgaaacgcagttgttcggcgtagggcagattctgccacttgcagccgccgcagaccccgaaatgggcgcagaacggctcttcgcgcagcggcgagcgcttcacataattgacgacgaaaccttccatataccggcggcgcttggagcggatctgcacatcgaccacgtcgcccggcacggtcatcggcacgaagaccaccacgtcgttgtaacgccccatcgccttgccttcggcggccagcgtcgttatctcaagcccctcgatcaggggataattcgctttctttcgagccatatcgcattcggatttagaacgcaaaggtacgaattttccgctatgcgccgcccgttttcctggttttggcacgttcacgcacccgtcccagccagaaaccgatgccgaacggcacgcccagcatgatgacggcgaaaagcacgatccaggcgaggagcttggccaacagagccggtacccggtccatcgcattttgtaccgccgcatcgaccgcctgctgcgcctgatcgaccagcgctttgcgctcggccgaaatataaccctgcaactccgcacgctggcggtcgaggtcggcaaatgcgttgtccacggcaccgttcaacgtttcgatgagcgctgcgacttcggtattcaggcttttgcccatataatcggcgatctgcggcaggtgctccatgaccgtcacgatgcggtcgaaattacgctccaggctgtcgagctgccgcgtcagccggttgcggacgctgtcctgctgcatctgcaactcgaaaatatccttcgaccagccgatgctattgaccatctgctcggactggccgccgaaacggtcgcccagatcggcgatcacatcggagatggagcctacgttatactgcgtttccacgcctttcgactggagaaattcgacccagggcagggtcgtattgaccggagtgaactgcgaccccgtgacgggattcgcctgcatgtaattccccacgaactcctgcatcaacgcgaacttctccggcgcgagcagggtcgaagccaggtgttcggctttcttgtccagacgcgccacgaccttgcgcacgagcggcgtctgcccggcgaaaagcagcgaatcgggcaggcggcggaaagcgctgtccatgcggacgcagagcagccacgtgtcgatgagcgccacgtcggggttggactgcatgacggcggtaacggcagcccgcgtcgcctgcatcttccaccggatcgcccggatccgcaccggaatctccgacgatgcggccgcgaccgaatcggccgtgcgggcgatctcgtccgccaggtcgtaataaaatccccgggtcatcatccgggtattggcctccgaagccggaagcggcgggttgcccgtatcgaccgacaccttgagcaacgaacagcctccgaacgacagcagcacggcgaccgccgcaaaaattttcagtaaacgtatcttcattcttctctctgttttgactttcaacaaattactgttcccggaccactgcgcccgctccggcagcgccgtttctttccggcgctccggttccaaaaatagcgattatccgcgaaatatcgctatatttgtaccttaaataaatttcacatatcatgaaaatcgcctgcctgactttcaatccgatacaggagaacacctacgtcgtttgggacgacacgaaggagtgcgcggtcatcgacgccggaaattccacccccaaagaagatgccgcactcgacggtttcctcgccgaacacgggctcaaaccggtgctggcggtcaatacgcacggtcatttcgaccacgtgctgggcgtcgaacatctgcgcaagacctacggcattcccttcgccctctcgggcaaggacgccttcatgctggacaccgatgcggtgggatcgaccgtttacggggtcaagatcaacgccatgccgaccatcgacatcgatctggacaaggtagaagaagtgaaattcggccataccgtcctgcgcgtcatccgcacgccgggccacacgccgggccacgtatcgctctacgaacccgaatcgaagagcctcttcacgggcgataccctcttccgcgaaagcatcggacgcacggatctgccgggcggcgactattcgtggatcatgcgttcgatcctggacaacctgctcccgctgggcgacgaagtgcgcgtctatcccggacacggccctgaaaccaccatcggccacgaagtgctctacaatcccttcgtcaccgaagtcctcaaccaggaggtgaactacaagaactaattccgtccgggtccgttatgaaggcgctgctccacaaaatcctctaccggacgcttccgctcgaaggttatctgcgggcggtgagccgcctctttttcatcagctaccggctggggcttggacggcgcagcgcggcgaccgaatacgtctatcacctgccccggctggcgaaagccggcgacacggccatcgacatcggagccaatctgggctattacgcccgtcccctctcggaaatcgtcggcaccgcaggcagagtccatgccgtcgaacccgtaccggtcgtttgccgggtgctgcgccgcaacctgcggggctgccgcaacgtcgaaatcttcgactgtgcgctgggagccgagaataaagagatcaccatgagcaacgactccgcccgcgaaacgggttatctcggcacgggacgaaacttcgtgggcgatgccgccggagagggcgccgttactttcaccgcccggatgcggcgcagcagcgagcttttcgccgggctggagcggctcgatttcgtcaagtgcgacgtcgaagggtatgagctgatcgtcatgcgcgagctgcgtcctctgctggagcgtttccgcccgacggtgctgatcgaaacaggtggcgaaaaccgcccgcagatcatcgaactcttcaccgaactgggttacaggggttacacgctcgagaacgggcgggaaattccgctcgtccccgacaccgaaaaagacatcatcttccgccaagcacgctaacgccatgagaatagacatcctgaccgtcgtacccgaactgctcgcttcgccgctgaacgaatcgatcctcaagcgtgcgcaggagaaggggctggtcgaaatccatatccacaacatccgggactacaccgaagacaagcaccgcaccacggacgactaccccttcggcggagaggcgggtatggtaatgaaaatcgaaccgatctaccgctgcatcgaagccctcaaggcggaacgggaatacgacgaggtgatctacacctcgcccgacggcatccgctacgaccagcacgaagccaaccgcctctcgacgctgggcaacctgattatcctctgcggccactacaagggcatcgactaccgcatccgcgaacatctggtcacgcgcgagatctcgatcggcgactacgtgctcacgggcggcgagctggccgcctgcatcatcgccgattcggtgatccggatcatccccggagccatcggggacgaagcctcggcactcacggactgcttccaggataacctgttggcccctccggtttacacccgacccgccgagttcaacggctggaaagtgcccgacgtgctcctctcgggcaatttcgcccgaatcgaccgctggaaggaggagcaggcctgggagcgcaccaaacggctgcggcccgatttgctgaaagaagaataagacttacgatatgcgttactacctgatagccggcgagccttcgggcgacctgcacggcgccaacctgatgaaagggctgaaagcccacgaccccgaggcgaagttccgcttctggggcggggacaagatggccggggtcggaggcagcgggaatctggccaaacattataaggaaacctcgtttttcggcatcgtcgaagtaatcaaaaacctgcggacgatccgccgccagatgaaagagtgccggcaggacgtcgaggcgttcgcccccgacgtgctgatcctggtggattatccgggcttcaatatgaagatggcccgctgggccaaggagcacggcatccgcgtcttctactacatcgccccgaaagtctgggcctggcgcgaatggcgggtgaaggcgatccgcaaatacgtggacgagctgttcatcatcttccccttcgaacgggactacttccccaagcacggcatccggccgattttcgagggcaacccgctcgtggacgccatcgaagcacgtcgggcatcgctgccctccccggacgaattccgccgccgccatgcgctcgacgagcggccgatcgtggctctgctggccggcagccgccgcagcgagatcaaggccaacctgccgctgatggccgacctggcccggaaatttcccgaccggcaattcgtggtcacgggggtttcgtggctcgaccgctcgatttacgaacaatatatcgcggacagcggcatccgctacgtctgcgaccaaacctatgaaacactcgcggcggccgaagccgccgtcgtgacctccggcacggcgacgctcgaaacggccctgctgaatgtaccggaagtggtagtctatcgcacgctctggttccaggtgaaattgcagccctacgtgctgaaagttccctacgtgtcgctggtgaacctcaacctgggccgcgaatcggtcgtggagatcatccagtccgacctggacatcacacgggccgaacgagagctgcgggctatccttacgggcggagaaaaacgggagcggatgctccgggacttcgccgaactgcaggccgtaatcggggcccccggtgccagcgaccgcttcgcggcccggatggtggagctgctgaaaaaacaggagcggtaagatgcgcgaactggtcacggcataccacacgcaactcctcggcggagggttgtcggtcctgctcggcattttggttcggttttttccgaacctgatcgtcggctacaatacgatgtccgccgaacagaagaaaaacgtggatgtcaaaggattatcgcgtttcatgtgctcgagcctggcagcaatcggcataggctggatcgcattgggtatgctggccggaaatctgggtggcgaaaaatggacgctcgccgtaaattttctttggctgcccgccggatgtattttcatcttggtcaaggcacaaaaatacgaccgcaacaaataaaccggggacaccggttcgacagcgggcaccgaacggacgggacataattcgaagacctccctttcggggagaacgagaagggacgaaagacgccccacctgcaacccttttgattttaggagtgcaggttttgacacgacgaggcgaggaccggacgggacatactttatgtatttcccattcgggatgagcgagaagggacgaaagacgccccacctgcaaccctttttgattttaggggtgcaggttttgacacgacgaggcgaggaccggacgggacatactttatgtatttcccattcgggatgagcgagaagggatgaaagatgccccataccctgcaaccctttttgactttaagggtgcaggtttgacaggacgatgcaaaggccggacgggacatacttgagtgtttcccagtcgggatgagcgagaagggatgaaagatgccccataccctgtaaccctttttgattttaggggtgcaggttttgacacgacgagacgaggaccggacgggacatactttatgtatttcccattcgggatgagcgagaaggggcgaaagatgccccctaaaatcgaaaagagatgaagataatttgcataggacgtaattacgccgaacatgtgaaggagctgcataatacggcaggcggacccgacggacttccgacggaaccggtattttttctgaagcccgatacggcgctgctgcgcaacaacgacccgttttacatcccctcattctcgcaggaggtgcactacgaatgcgaattggtcgtgcggatcaaccgggtaggcaagtgcatcgaagagcgtttcgcgcatcgttactacgacgaagtgggactgggcatcgacttcacggcccgcgacctccaacgcgaggcgatcgcccgagggctcccctgggagcgtgccaagggcttcgaccactcggcggccctgtcgcccgaattcatcccgctcgcggagctgggcggcgacgtgcagcggcttcacttcgaactgaccatagacggccaagtccggcagcggggcgacaccgcccgaatgcttttcggcatcgaccggatcatccaccacatttcgcaatacatcacgctgaaaatcggcgacctgatctacacgggcacccccgccggcgtaggtcccgtgcatccgggcgacaacctgaaagcctcgctcgaaggacacatgctgctcgatttcgatattcgctaaccgtttttcacgccatgaaatcgcaattgctactttcctttctgctggcagctctcctgccgatgaccgcctccgcccaaagcggagagggagaatttcccgatcttttcaacacctcggcggcatacgacatgctcgccgtttttccacaggcggacaaactcgccgaagacccgtttttcaccggcacactgggagcggacacgctgttcctcgaccgggcgcaccggatcgattcggtcgtccgtccttcgcaactctgcaacctttacagtttgagcggaggcagcaaagacgatccggaacaagtcgtcgaattcttcgcctcgttcgaccccgaatcgctcccgcaaaaggtgcggggtgcctggatcgacgaaatatgcagcgtccgcgacgaactctcttactgcctgcaacggctcgcacaaacgggttacgcacaatattggcaggagcaggtgcggccctgcctgaacaacgcgatcgaacagtaccggatcgacccggaacaactgggcgccatccatcaggaaatcacccgtctggccggcgggcagcctctggacgccacgggctcccgaatctacatcctcgacaacatagacaacgctttcgccctgctggacgaaacattctgctgtacgcctctgctgctcgatcccgaaacggcccgccaataccgtatcgacttcatgcaggtctatattcacgaaaacctgcaccggctctcgctttcgggcgaactgctcgacatgttgcagacgctctacgacaacgacgacttctaccgcacgcacgaagaccgggcacgcgcctacggcgaaggcggcaacgaggcattcgtcgtagcggccgaacggtatgtatcccgccgcctggggcgcatcgacgacaagcaggtattggacgaatttctcgtttactgcgacggcacgcacgtattggcgccgatcgtttaccgctatctgcccgacctgcgggacggagagtccttcgacggctttctccgccggctgttcgaccgccgcatccggccgggcaaagtcgaaagccaataccgccgggctatgaaaaaactcgccggaacccggaaatccgaaccaacggcggcggaaacccggtcccgaacccaaaatccgtaacgccatgctgctgcacgacaaactcaaaccctaccgcctgatcctggcctcgcaatcaccgcgacggcagcaactgctcgccgagagcgggctgccgtacgaaccggccccccggtacgactgccaggaggtctatcccgcgacgctggccgcgacgcaggtgccccgctacctctcgcaactcaagagccgcgcttatccccggccgctcgcggaaaacgaaatcctgctgacggcagacaccgtcgttatcctgaacggcgaggtgttgggcaagcccgaagaccgagaagatgcgatccggatgctcgaacggctctcgggccatcgtcacacggtggtcacgggcgtcacgctccgcacggctcgccgccgccggagtttctccgtacgcagcaacgtctggttccgggctctgacccgcgaggagatcgtctattacgtggacaacttccatccgctggacaaggccggcagctacggcattcaggagtggatcggctatgccgccatcgagcgcatcgacggctcgttcttcaacgtcatggggctgccgatccaacgcgtctataccgaactcaatcaattcattcaatcaataaaaaacaatccatgaaacgtatcttttcgactctctgcctcgcgctgctttcgctcacggcactcgccgatgagggcatgtggctgccgagcctgatctcgtcgcgcatcgacgatatgcgcgccaaaggattccaactgactgcggaagacatttacagcatcaacaaggcttcgctcaaagacgccgtcatgctcttcgacgacggctgcacggccgagctcatctccccggaaggattgctgattaccaaccaccactgcggctacggagcgatccagcgcctgtcgtccgtcgagcacgactatctgaccgacggcttctgggcacagtcgcgcgaagaggaacttcccaacgaaaacctcaacgtcaagttcctcaaacgcatggaggacatcaccgagcgtctggccgccggcgagagccgtgaggaaatcctcgaaaaagcccgcgagaacggccgctacaaagcctcgatcgagcagatgtactacggcaaccaacagttcctgttcgtctacgagcagttcgacgatatccgcctggtaggtactccaccctcgtcgatcggcaagttcggcggcgacaccgacaactgggcatggccccggcacacgggcgacttctcgatgttccgcatctatgcggataaagacaaccggcctgcggcctactcgcccgacaacgtaccctaccgctcgaaaaaacatttcaagatctccaccgaaggtatccaggaaggcgacttcacgatgatctacggcttcccgggcaacacccaggagtacatcctctccgacgcggtcgattacatcgtgcaccgcagcgacccgatgaaaatccgtatccgcaccgagcggctcgatcggatcaatgcggcgcaggagaaagatcccgccatgcgcatcatgtacgcggcgatcaacgccggcatctcgaacgcctggaaaaaatggcagggcgaagcgctgggtctgacgcgtctgaacactgtggcgagcaaacaggagtacgaacgggccttccaagcctgggcccaggacaagcccgaataccgcgacgtgctcaaagagctcaaggcggagtacgcccgcatcttcgacgcctacttcgcactcgaactgatgagcgaaaccatccgaaccggcgagctcaaccggatttacaaccggccctcgttcggcgacgaaatctatccccaggtgaaggcgctcaaccgcgaccttttccgcgtgctgtaccgcgaatattacgacaactgcccgcaagagtacatggtaccgctcttcgccgccgaagtagagcgtctgggatcgcccgaagcatacgccgagctgatgttcgaagccacgcacaaggaggacgaatcgaccgaggctcccgaactggaagctctgcgggccgatattcggacgacggtcacccgcattttcgatgaactgggcaagtgctcgacccgcaacctgaacagcgagcgcctgaacgaactctacacgacctatatcaagggtctgcgcgaatgggatacggagcgtgccttctatcccgatgccaacctcacgctgcgcgtggcttacggcaaggtaggcggctaccggtatgccgacggagtatatcacaagccctacaccactgtcgaaggtattttggaaaaggacaatccggaaatttacgactacaacatcccgcagcggctccgcgacatcatcgccgccaaggactacggacgctggggcgtggagatcgacggccgcacgaccgttcccgtctgcttccttgcggacaaccataccacaggcggcaactccggctcgccggtactcaacggccggggcgagctgatcggcgtgaatttcgaccgcacgtggctctcgaccatgagcgacatcgccttcgacccggctttctgccgcaacatcgcgctcgacatccgctacgtgcttttcgtaatcgaccgcatcggagacgcttcctacctcttcgaagagatggacttcgccgaataaaccgttttccgaagcaaccgtgccgcacgctgccgggaccgccgcacgcttcgaaaacaacgtcgaattgccgggtcagtttcgtgacccggcaatttttttgccgtatattttgggaaaaacaaaatagtcactatatttgcacacctgaaaacccgctgcggcgggaatcgaggcccaggtggtggaattggtagacacgccactttgagggggtggtgggcattagcccgtgtgagttcgagtctcgtcctgggcacaacaaaccggtttagaataatttctaaaccggttttatttttcctgatcgtgattgcatacttcatgaccgcttgggacgctatgcaccccaagcccccctccgagaagagaacgcagggaaagtgcagaattataaacgtagccgcaggccgcgaataagcgaccgtcggattcgatctgtctcgcaacgacatttagaggaaaacatccttttccctgatcgtaatccggttattcttcctcgtcttctttttcggcccagcgttcgagtatctgacgcacggcttcgtcgtggtctccgttggtgatacgataagtccagcaaacgctgtttccgtccaccttttcggatacccactgcaattggtcgcgcggcgtaccgcgttgcaattcggtcatagggtcgaagaaagaatacatagcacacgtgtcatctctataactaactaaacgataattacggtctggatcttctgttttcatcaattcttccatcgacatattcgcatccacgaactccggcttttctggttccggctccggcgtgggctgttcttccggcggagtttccggtgccggactttctgccttgtcggaacagcccagcggagccaagaacaggagcaaggctcctactgataaatagacacgtactttcataatcgaatttatttaatttaataagttgattccgatcccgcccaaaagactcttacaaactcaccgcaacccgatagcattccggccagaacttctccaccgaagctcaacgatataaggatatggaaaaaatttcgctttcccaaccgctttttcccgacaaaatcccccccccgaaaaacgcctccggaaggccctgtaagggcgaaaataaattcgaaaaaatttccgtatggcagattaattgcacgtaaaccggacgatcggacctatattaacctaccgcttccatgaaaaaagaaaagaaaataatctggctcctgacgggcatcgccgccgtgtcgctcctcgtactctgcaccgtagtgatagtccgcaccgcgacctatcccttcatccgcaccaccggtccggacgggcctccccggagcgtcgaaccgtccgcccaggccgtcgaacgattggccggcggaatccggattccgaccgtaagcgatgcgatcgaccggacggacgacaatccgttccaagccttcaaagcctatctgccgcaggcatatcccgcgatttacagtcagttggatactctgacgatcaacgaatacgggcttgtattccgctggcccggcaagaacccggccctgcccccgatcctgctctgttcccactacgacgtggttcccgtgctcaattacgacccgtcggctcccgatgcaccccttccgggctgggactacccacccttctccggcgccgtagccgacggacggatctacgggcgcggcacgctcgacatgaaaggcatgctgttctcgatcctcgaagcgaccgactcgctgcttgcggagggattccgcccggagcgggacgtgtggatcgccctcggattcgacgaggaaaccggcggcacgcagggtgccctgaagatcgcccgctatttcgaagaacagggcatcgctttcgacgccgtctatgacgaaggcggcatcatcatcgcccccgggctgggaggaatccaacgtacggctgccctcgtaggaacggccgaaaagggattcagcacgatccgaatcacggtccggggcaccggaggtcactcttcgatgccgccggaaaaaggatcgctcgtactggcggccgagatcatcgaacaactcaaccgggagcagatgcccgccttcctgacagctccggtcatagctttcctcgatcggatcggcggctcgatgggagtcgcccagcgcaccgcgatcgccaaccgctggctgctggagagcctgctgctccgctcgttcgaaagcaacccggccaccaatgccctggtacgcaccaccaccgccatcaccatggcccggggcagcgacgcggccaacgtactggcttcggaagccgaagtcacggtcaatttccgcctgctgccgggcaacacgacggcccaggtgaagcggcatgtcgaaaatatctgcaacggatacgacgtccggatcgaggaactctcgacccgcgaaccgtcgcaaatctccccggacgatgtccacgccttcgaaatgatccgcacctcgctcgccgggctctacccgggtacgatcgtaacgccctacctgacgctcggcggcacggacgcctacaaatacgaggcggtgagtccgaacgtatatcgtttcatgccggtactccttaccgaacaggaacagggtacgatccacaacgaaaacgaatcgatctcgctcgagaactacggacgaatgatcgcctatttccgcgacctgatccgaaattaccggtaacgggagcggatcggtcatcgcagcgacaatggcaataacctttagttatatgacataactttttccccgttgtttcaaggggataaagcctgtatatttgcagcatcgtttacaaaaagttattagcaccgtatgaaaccgctgcaactcacgaaatccatgcaatccgcaaagctcaactggcgccaaatcctttttgccggactgctcacaggttcgctcttctgttcgcccgtcgtcacgctcttcgcgggcattctcttcgccctgaccctcggcaatccatttccggtctggagcaagaaggcttcgaaaaaattgctgcaatactgcgtcgtcggactgggattcggcatgaacttccacgaatcgctggccgccgggcgcgaaggcatgaccttcacggtggtttcggtagtcacggtaatgatcgtcggcgtagtgctgggacgcctgctgcgcatcgaccgcaaaaacagctacctgatctcgtcgggcacggcgatctgcggcggcagcgccatcgcagcggtcgcacccgttatcgatgccgacgagaaccaaacttcgctgtcactggccacgatcttcattctcaacgccgtcgccctcttcgtattccccgtcatcgggcattggctcggcatggggcagacccagttcggaacctgggccgcgatcgccatccacgacaccagttcggtcgtcggcgccggtgccgcctacggcgaggaggcgctcaaggtagccacgaccgtcaaactcacccgcgccctgtggatcatccccctgtcgctggtgtcggccctgatcttccgtcagaaaggcaagaagatccagatcccctggttcatcttctggttcgtcgttgccatgctcgtaaacacctactgcaacctgccgacccagctcacgcacggcatttcggtcgccgcccgctgcggactttcggccacgctgttcctgatcggcggaggactctccatagaggtaatccgcaaggtaggcctcaagcctctggtgctgggcatcatcctctgggccgtcatttcggtcgcatcgctcgccgtgatcttgctcttgtaggcagcatccgattaccataaaacagcccgaagatcgaaaagtcttcgggccgtttccattattacctaattatattctaaaggtattactccttttttccgtgacaggaataacgaaggaccggatcgcggacgaagcgttcgaaactgcggcactcctcgtcggtcatagccttcggatagctcatcagtaccaactggtgcggctcataaggacgctggaacgacggatggacataatggtaatcgttgcgcacgacccccagccgctcgtaaaatcggaggcggcgaacggcgatttccgtctccggcggatcgatttccagcacgatgcgtccggccttccggcaaaaagcctccaatacccggctgcccatattggcaccgcgcaggtcgggcgaaatggccaaatgctcgatatagacatattccggagccgtccagtaataaagaatgcctatcaaccggccgtccgaccagatgccgtcggccgtatagtgcggatcggaaagagcttgcagatggtcttccagcgaacggatctccttctgggggaaagagttctgatagatcgcccacgcctcgtcccaacccgggtcggcaggcgatcggaaaggtctgaatttcaaatcggtttccatagataaaattatatatattttagcatacctcttcggaaacgtagtgccccctccggggaaggggtccagagaaggtccgcattacgacacggccacaagccacgaataaacgaccaatggtttccgatgacagaccaccgcattctcgagtacccgaacggatccggcggcgatcccacatccgaaaacgacccgtaaaatctcgcagaagcgccgcgaaggatcaggccgtatggcgggcgaactccacgaaacgtgcggccaaggcatcgctgcgtccttcgggccagcagaacgaaaactcccgccggatcgtacagccctcgatgtcgatgatgcggagttcgccgctgcgcagctcatcgacgatcgatgccaccgacacgatggccatggcgtcgctgttgcgcacgaaactcttgatgctctcggtactgcccagttgcatcaccacacgcagcgaagcgagccgtacatccgccgccgcgaggtatttcgaaatcacttcgagggttcccgaaccgctttcacgcagcaccaggggcaccgtctgcaactccgcgagcgtaacctggtcgcagcggccgtaccggcctttcgtggaagcgatcagcaccagttcgtcgggaatgaacggttcgtaatgaaaccccggatgccgggcgctgctttcgaccagccccaaatcggtatcgtgacgcgcgagggccgcctcgacctgctcgctgttgcccgacgcgagcgaaaccttcacctcgggaaaccgggccgtaaaacgggccagcacctgcggcagaacatactgggcgatggtcgtactggctcccaccttcagttcgccgcccagccggtcggtgaaaagatccatctcgtactgcagacggcggtagccgtcggcaatgcgttcggcatgctccagcatgacacggccggcttcggtcagcgccagacggctgccgctgcgctcgaaaagctgtaccttatagcgggattcgagttcgccgatatgcttgctcacagcgggctgcgaaatgaaaagctgctcggcgcatttggtgaaattgagggttttggccgccgtaatgaaaacccgcaagcggaaatcgtccatagcgacctaatccaaaccgccctgggcggcgaactcggctacggatcgtttgaaatgctcgatggtttcccgcatcgtcatgaaagacttgcccccggccgcattgcggtggccgccgccgttgaaatacttgcgggcgaaaagatccacgtccaccccgccccgcgaacgaagcgacacccgaatgaatttatgcgtggcaatgaaaatcgccgacattttcatcgacttgatcgtaagagcgtaattcacgaacccctcgctgtcgccgggctggaactgaaaccggcgcatctcgctctccaaaagcgacatataggcgaccgcaccgtcgtggatcacctccatcttgcggttgatcgcatagccgaacagccgggcacggccctcggtgaaggcgttatagacattgttgtggatcgtgggaatgtcgatgcccgtttcgaccagcaccgcgacggcccggtacaactccggcgtcaggaacgaaaacgaaaagttccccgtatcggtcatcatacccacgtacaacgactcggccatactccgcgtaatcgcctgcgtgcccagcatcttttcgaggatccgatagatcaggaaagaggtgctcgacgaaccggtacaggaaaacatcagatcgaaaccgggtcccggcgacagatggtggtcgatcaggattcgcctggccgtcgtattggattcgatcacctcgctcaacccctccagacgggatacggcgttgaagtccaggaaaaagatcaggtccgactcctccaccgcacggcgggcgactcccgcttcgtccgtcttgaaaagcaccaggttctcgatacccgtcatccagtccaaaaaataggggtatttgttgggcacgatacaagtgacgcgatgccccatctccagcaacgcctcgcgccacgccagcgaagagcccacggcatccccgtcgggattcgtgtgcgacacgatcacgatattctgcgcaggccgggcaagcaattcgcgcagccgttctatatcttcttgggaaaccatcattgatgcaaagatacgattttatccgttaaatatcaaatccgcacccgttccggggcgtttctccgttccgaaaccgatcgtggagcggatgttcaatctttccggccatcgtccggcggcagcaggatcataccctccggccgacaggatatttcgggcaaagagaggccttcgaccaaccgcacgcccggtctcctctgcgctgcggactcggaagagcggacggattgcccggtgatgctcgtcaccgcatactcgagacaggggtcgtccaaactgccgaactcctcgtatccgttgttccaatctcccttcaaagcatccggcgcaagaccgttcgggtccaccgtttcgagccgggcgttatatccctggaaagagaccggcatgaagaggtattcgtacgctccatcctccagatagacaccctccatccccacatttttgccgttggtcttctgcccgaccagcaccacttcgagtccgattccccgcaaagcattgacaacggcttcgctcgccgaagccgtaccggaagagacgatgacatacagccgaggaagatccagcgcatacccgcgcaggtcggctccccggtaatcgccgtagatgaactcctcgtaaaaacgctctttcgactcgtcataagcctgcccggtctccgccgccgtcatttcagggtattccattcgcgcatcgttataacggtaatactggaacacctgcccttcgcaccgggcaccggcgatgcaggaggcgagcatccgggaagacatcacatatcctccaccgttcaggcgcaggtcgaggatcaagtcgttgatgtccgcatccttgaacgcttgcagcgcatccagcaattcgccgtcgaaagccgcgtcgaaactggcgtacaccaggtagccgatcttgtgctccccgtattcgagcacgtcgcggtacagcaccggattttcgtatatcaactccgccgtcagcttatgctccgacacgccgaaaccgccctgattatccgccacggagagcgtcgcggcgccgttcggtgcgagcagtttggaatagaccgtattcaagttcccggcagtgatccactgtccatcgacctggttgatgatcgttccgcgtccgaggccggccctggccatcggagagtcggggtacacggccataacggcaaaaccgtactgccccgtttcctttcctgcgtctgtataggagataatcgccagggaaacggcgccgaaaccgtaaacgggctccttcgggaactgactgtcgatatccgcagacaaggccgtccggctcaccggagagaggcgctggatgttggaatagagctgccatctcccgttacggaacttcttgtccaggtcgttggttctcatacgcataagcacgccgtcgagaaactcgtcgtaaggcaggccgaaatcgggcgaaagtgtcgcatactcctcgttccacaagtagttgcgccgcaggatgccgtccatatcgtgattcacctccggctctccgtcgtaaccaccgcctccgccgccggtcgcatccttggtacacgagacggccgcaactatcgcggcaaacactccgcaagcgagaatcgcatggcaaaatcgcttcataatcattcggttttagatcgtttgttgtcttcggcatatttgcggcaccaggtcgaaataccgcactcggcacatttcggcgcccgggccgtgcagacatagcgtccgtgcagaatcagccagtggtgagccgtcggcagcaggtgggaagggatgtatttttcgagggtcagctcggtctgcaggggcgttttcgaccggttcgtgagtccgatacggttcgaaacccgaaatacgtgggtatcgacgggcatcacctccttctgccagatcacggcgcccacgacattggccgtcttgcgtcccacgccgggcagacgttgcagctccttcagatcgctcggtacttcgccgccgaactcctcgcagagcatgcgggccatgcccgccaggtttttcgccttgttgttgggataggagatgctcttgatgtagggatagatctgctcaggggtcgcggcagccatagcctgcggcgtaggaaaagcctcgaacagagccggcgtagtcatattgacccgcttgtccgtgcactgggccgacagaatcacggccaccagcaactcatacggcgagccgtacgcaagctcgctctcggcaacgggcatgtgctcctcgaaccacgagatcacccccgcataacgctccttcaaagtcattgtcttccagttttaagccggaatccttccggcggattttctataatttggtcagtttggcgaatttggccagcagggttttctccccgtatccggaaaattcgaccaccagtttatgatccgacgccaatgtttcgatgcggcggatgacccccgcgccgaacttcaggtgcgacacccggtcgccgaccgaataatcgccgcacgatgcgggcgcgactccttcgaccagcgacgattcgccctgccggatgccgacgctgcgcatcccggccgtcgaacgggtcggctggacaacgacgggacgctgcgcctccgattttaccccggcggacgaacctccgccgaaacgcgccccgacctgcgaaccgcccgccgcaggcttctgctggtagcggtagtcgaaacggcggcgcagctcgtcgagcgccgaggagccctctccccgcccggccgagcggcggacgggttcccgttcccgctcctcctgcatcgcatccgtttccaggtaacggctgtcgatctcgcgcagaaagcagctcggacgcgagaactccatattgccccatttgaagcgcatctcggcataggagagcgtagccaactccttggcccgggtcagcgccacgtaaaagagccgccgctcctcctcgaaaccgtcgggcgactccacggcccgctgcgacgggaagaggttctcttccaatccgacgatatacacgaatttgtattccagtcctttggccgaatgtacggtcatcagcgtcaccttgttgcgatcctggggatcgtccttgtccatgtcggtcatcagcatcaccccctgcaaccactcctcgatcgtagcccgctcctcttgctgacgctctccggcccggatctcggcctcgcgctgctcgttgaagagctgcatcgagttgagcagctcctcgatattgtccagcgcactggtcgcctcgggggtgttctcggcccgataagcgccgatgatacccgaacgagtcgcaatttcgagtcccaagtcgtacagccccttttcggcccgggccaacgacagcccccggacgagggccacgaactcggtcaccttgcggacgatggtcttctgcacgggatccgtcaccggctcggccgtcagcgcatccaccgcttcccacatcgacagattacgggcttgggccagcaaagcgatccgctctacggtcgtatcgccgataccccgcgcagggtaattgacgatccgcttgaaggcctcgtcgtcgcgggggttgataaccagccggatataggccagcagatccttgatctccttgtggtcgtagaacgaattgcccttgtaaatacgatagggtattcctttgcggcgcagcgcgtcttcgagggcctgggactggttgttggtgcggtacaggatcgctgcctcggcccactcatcgcccgcagcccgcaccttgtcgcgcaggtcgctgaccaccatttcggcctcctcgcgatcggtataggctcggagcacgcggatcttttcgcccatatccccttccgaaaagcacttcttctccatgcgtttcgaattgcgttcgatcaccgaattggccgcctcgacgatcgtgcgcgtcgagcggtaattctgctccagcttgaagatcatcgcgttggggaaatccttcttgaacgaaaggatgttctcgatcttggccccccggaacgaatagatcgactgggcgtcgtcgcccaccacgcagaccttcgaatggagctgcgacaggcgccggatgatgacgtactgggcatagttggtatcctgatactcatcgaccaggatgtatttgaactgctcctgatagtgggccgtcacgtcgggacagtcccgcagcaggatgttggtctgcaacaacaggtcgtcgaaatccatcgccccgttccgcttgcagcgggcgcaatagatgttgtagatgttgccgaactcgggaatctgcatccgccggtcttcggctgcggcacccgcattggccaggtaagcgcccggcgtgaccaggcagttcttggcgtaggagatgcgcgaggcgagcatcgcaggtttgtatttggtatcgtccaggttcaactccttgacgatggttttcaggaggttcttgcagtccgacggctcgtaaatcgtaaaactctgggggaagccgatccgttcggcgttgtcgcgcagaatgcgcgagaaaaccgagtggaaggttcccatgcggatatagcggtgccgtccgtccggcagcatctgggcgatgcgttcgcgcatctgctcggcggccttgttggtgaaggtgagggcgaggatgttgtacggagccaccccctgctcaatcatataggcgatgcgcgaagtaagaacgcgcgtcttgcccgacccggcgcccgcgatgatgagcgacggcgaatcgtagttcaccaccgcatcccgctgggcctgattcaggcctttcaatatttgagattccataacgtgcaaatatagcgatttcccggcaacgacggagcgtccgcagccgaataatacgacggagcgccgcaaccgaaggcgaacctgcaggacatcctccgcccgatctttgccccgaagcggcgcccgggtgcggtttttcaaccggggcaccgccccgcatcagggcgaaaagagcggtcgggattttcgattttcgaaaaaaatacatattttgcaataattttgcagggcatgcgttgcataaataccgaaaacaacgaaaaaccgaaaatacacaccgaaaatgagtgaagtcatcaacatcaaggaactcaacgaacggatcgaacgcgaaagcgtcttcgtcgatacgctgcgcagcgaaatgggtaaggtgattatcggacagaatcacctgatcgacacccttttgatcggcctgctctccaacgggcacatcctgctggaaggcgtgccggggctggccaaaacgctggccatcaccacgctggccaaggccgtcgatgccgatttctcgcgcattcagttcacccccgacctgctgccggcagacctgatcggtacactgatctactcgcagaagaaggaggagttcctcgtccgcaaaggccccgtattcgccaacttcgtcctcgcggacgagatcaaccgctcgccggccaaggtgcagtcggctctgctcgaagccatgcaggagcggcaggtgaccatcggcgacgaaacctatccgctgcccgagcccttcctggtgctggcgacgcagaacccgctggagcaggaaggtacttacccgctgcccgaggcgcaggtcgatcgtttcatgctgaaagccaagatctcctacccccagaaacaggaggagcgcgacattatgcgtatgaatctggccggggaaggactcccgaaggtcaataaagtgacttcgcccgaagacatcgtcaaggcccgccgcgtagtcgaagaggtctatatggacgaaaagatcgaaaaatacatcatcgacatcatcttcgccacccgcgaaccggccgaatacaacctcgaaaaactgcagcccctgatcgcttacggcggctcgccccgtgcgtcgatctcgctggccaaggctgcccgggcctacgccttcatccgccgccggggttacgtgattccggaggacgtgcgggccgtctgccacgacgtactgcgtcaccgcatcggactcacctacgaagccgaggccgagaacatcaccacagagcagatcatcaccgacatcctgaacaacgtaatcgtaccctaattgaaaatgcaataatgcaggagaccgaaaacgatatcctgaaacgagtccgcaagatcgagatcaaaacccgggggctttccaacgaaatcttcgccggaaagtatcacacggccttccggggacgcggcatgtcgttttccgaagtgcgcgaataccgcgccggcgacgacgtgcgcgacatcgactggaacgtcacggcccgctcgcgcacgccccacatcaaggtctacgaagaggagcgcgagctgacgatgatgctcctggtggatgtcagcggctcccggatgttcggcaccacggaccgcctgaagaaaaacctgcaaaccgaaatcgccgccgtgctggccttctcggcctcggagaacaacgacaaggtgggctgcatcttcttctccgaccggatcgagaaattcatccccccgaaaaaggggcgcagccatatcctggccatcatccgcgaactggtcggcttcgagccgcaatcgcgggggacccgtatttcggaagcgctgcgtttcctgaccaacgtcaccaaaaaacactgcacggccttcctgctctcggactttctcgatcccggcaaggaccgtacggcgctcgaggacgcgctcaagatcgcttccggaaaacacgacctggtgggaatccgcgtcagcgacccccgcgaagccgaactgcccgacgtagggatcgtcgaaatgaaagacgccgaaacgggccgaaaagcgtgggtggacacctcctcggcccgggtgcgggagcactacgcccgcgtctggcaggagcggagcgccgccatcctctcggcgctcaaacaccaccgcatcgacacggccgaggtatcgaccgacggggattacgtcgtggaactcatcaaactattcaaacagcgatgaagtcgatcccaaataacccggcatcaacctgctctccgttcgcacgcaacggcggtattcaaccgtccgccgccgcagagcggcaaaatgccgcgcaaacacctccttcggaagcggtgcccgtcggcctgcggtcttcgggtcgtccgaaagccggtcggacatccatcacgaaaagagtaaaaacagctctggcgacagctcttctgacggggctgacgaccgttctgtacgccgcaccgccgacgatcaccgcccgcgtcgaacccgacagcatcggaatcggcgaccgcttcgacgtggtgatcgacgtcgatcgtgatttggtgcaggtcgtggaatttcccaccttcaacccgcctccgcagagcggactggaggtcgtcgaatcgcatccggtggacaccctccggcgcgacggacgtcacctgagcctgcgcaaacgctacacgctggcggcgttcgaggagggcaacctcggcctgggacgcgcacaagtgctctatctggacaagaacatcaccgacacgctctataccgccgacaccctgcggctgcaggtgggaacctttcagatcgactccacgtcgcacacgatctacgacatcaaagcccagcgcacgctgcccttccgctacggcgaaatcagcggctacgtcctctggagcctgctgggtttgatcgtcctgggcggcgcgatctacgcaggccgccgcctgatggcccgctacgcccgcaaggtacgcgacatcttccgtcccgcaccgcccctgccgccccacatcgcggccatccaagcgctcgaaacgctccacaaccagaaactctggcagagcggacgccacaaacagtattactcgggcctgacggacatcctgcgcacttatctggccggacgatacggcttcggcgcgatggagatgacctctgacgaaattctcgcggcagtccgccgttacgacctgccgcagaaatgcgtcatggacctgcaggcgatcctccgggacgccgacctggcgaaattcgccaaagcccagtccgaagggacgaccaacgaagacaactacctgaacgcctactatttcgtcgaggagaccaagcctgcggaaatcgcggaggagggcaccgaacaggacgacacccaatagcatccgacacgccatgccaaacagaatcctactgatattcatcaccctgttgctcggaatcggcagcgcctcggcccagaaataccccgagcgcagcctcgtgcgcaagggcaaccgggatttcgcgaaggagcggtacgaccgcagcatcgaacgctacacgcaggcgctcgaagcggcccccgaaaacttcgaggccgcctacaacctggggggcgccctctaccgtaccgaaaaatacgaggaggcggccaagatgctcgaacgcatcgccgcagactccacccgcaccgaccaggaacgggccgaggctttctacaacctcggcaacgcccaattcaaacaggaaaaatacccggaagcgctcgaaagctacaagaactccctgcggatgaatcctgccgaccaggaggccaagtacaactacgcctacaccaagcgactgctgcaaaaacagcagaacgaggatcaaaacaaagatcagaacaaggaccagcagaacagcggcggtcaggatcagaatcaagacaaaaacaaggataataattcggacaaagaccggcagcaggacaagggcggcgagcaacaggatcaacaagaccggcagaacggtcagaatgatcccgacaagaacggacaaaatcccgacgaacagccgcaggattccgacaagccggacagcgacgaccggcagcccggccaaccccgcgaaaacggcatctccccggaagaacaggaacggatgctggatgcgatccaggcccaggaggacaagacccaggagaaactcaaggagaaagccggggtcgtggtacgcggcaataaaaactggtaacgaatcaattctgaaacggctatgcaattcgcctctccatactttttgtggctgctcgcggtcattccgctcatggtggtctattacgtctggcggacccgtcagggcggcgcttcgatccaagtatcgaccatcgacggtgtcgccgaagcaccgcgcaccgtacgttattacctgcggcatctgcctttcgcgctgcgctgcgcggccgtcgcgctcctcatcgtagcgctggcccgcccccaatcggtcgatgaaggctcgacgagcaacaccgaaggcatcgacatcgtgctggcgatcgatatttcgacctcgatgctggcccaggacctccagcccgaccgcatccaggcagccaagcaggtcgccggcaacttcatcaccgaccgccccggagaccgcatcggactggtggccttcgcgggcgaagccttcacccaaagcccgctgacgaccgatcaggggacgctgcaaaccctgctgggacgcctgcgcagcggcgtggtggaggacggcacggccatcggcaacggactggcgacggcaatcaaccgcctgcgcgagagcaacgccaaaagcaaggtcatcatcctgctgaccgacggagagaacaaccggggcgaaatcgcccccctcacggctgcggagatcgcccgcgaccagggcatccgcgtctatacgatcggtgtcggcacacacggcacggccccctatccgacggtggacttcttcgggaacccgaccgtcgtgcaggccaaggtgcaaatcgacgaaaagatactcggcgagatcgccgatctcacgggcggccgttacttccgtgccacggacaacgccaaactacagtccatctacgacgaaatcaaccagctcgaaaagagcaaggtcgaaatatcgcaatacaccacctacaccgaggagtacctccgctgggcagcggcggctctggccctgctgctcgtggaattcctgctgcgtaccctctggttaaaatccctgccgtaatgttcagattcgcatatcccgaatacctctggctgctgtggctcctcccgctgctcgtcgccgtatgggtggcggccggacagctcgcacgccgacgcctcaaccgtttcggccggctcgaaaccatccgtccgctcatgcccgacgcttctacggggcgccggcgtctgaaattcatcctgttcctcacggcattcgccctgctcaccctggcgctcgcacggccgcaactgggttcgaaactccgcgaggtggagagccggggtatcgagatgatgctcgtggtcgatgtttcgaactcgatgctcgccgaggatttccagcccaaccgcctcgaacgcaccaaatacgccatcgacaagctcttcgacgggctcaagcaggaccgcgtgggactggtcgtcttcgcgggcgacgccgtagtgcaactgccgatcacctcggactaccgcatggccaaagcctttgcccgcagaatatccccttcgatggtttcggtgcagggcaccgacatcggtcaggccctctcgctggccaccatgtccttctcggaaaagggagataaccccgcaggacgcgtcatcgtgctcatcaccgacggcgaagggcacgactccggcgccatcgaagcggccgaacgggccgccgaacagggcatccgcatcttcaccatcggcatcggcacgccggaaggcgctccgatccagatcggcggcgagttcatcaaggacgacaagggagagatggtcgtatcgaaactgggcgaacccctgctcgaaaagatcgcacaggcgaccgacggagcctacatccgctcgaccaaccagtcgatcgggctggacgaaatcgtacgcacgatcaacaatatggagaaaggcgacctggctgccctccgcttcgaggagttcaacgaacagttccaatacctgatcggagcggccctcgtcctgctgcttctggagttcctgctgctcgaccgccgcaacccgctgctccggcgtttcaacattttcggtacggacaccgaaaaataaaaaacagcgattcacctctgacgccgaatcgccgggccttttgcaggttccggcgactcggcgttagagaaacaacggggcgtatcaccccgcgatcggatggctctgcgctatctcccaatgattagcggccaacagcaccatcatcacggcaacgaaaagcaacaaccagtccacctcccggttgcggtatattcgggccaggaacaaccccaaggtcccgagtgcaagcaaaccgtcaccacacatcgctacccaaaccgatacttcccaagagatgacctgggaaacaagcagctcgattccgatcacaaccgccaaagcccacagcagcctctcggaagtgaatatccgcccgggaaccggatcgcatcgcacgatccgacagcggtctcccagaaaatgtctccaattcgaatctctattttgcatacttcacacaaatatcaaaagttcgggcagcaccatccatgcaactcttcaaagcaacggtatttccaacgagggataccgcagcagccggtgcagcgcttcctccggataagaccgaaacggcagtcaccacagccatagttatatgataatcccttttacagcgttttatatcactattatattgatcgtaacattgatcaactccccctcggctttcaaattccaccaaagaattttgtaccaatggataaacaacagctattgcaacctgttcattcggcaacaaaatagtgtttgcaagaatttgatttaaatcatcatcaaattcttcatcaaccagccaacgataaataatttggtaaaaaccagaagtagcattttcttcaatccaattcaaataatcataaaaatctggttcataatcagaacgagtataaatatctccacaataatcaaaattattttgaaaatcatatcgagtagacaactcttttaaccaattatctaaaattacagcatcttcttcagacagataccctccaacttttgattgagacaatacaaaatcacttaagcgaccaacctcctgcaaaaaattatctttcttttctgtaccattttggacatctgcaacttgacatgatgataatatcaaaatagatatcaaatacatatattttctcatagaatcaatctttatatataaaacatattaaatgaatatgtataaatcctattattttatgccattcaccgcttgattaactacttatattatctatggtatcagatgatggcaagtcactattgacaccgttacgataatcattattcagaacttttactatacttataaataaacttcgcatttttcgtcctaatagcggtgacccgacatatacaacctcgttatttgaatccaacaaaaaggcattatattccttatttataggtaaaagattattttcttcaaactccccctccttatcgcataatacaggaaatataaaatgctctgaatttaaactatgaaaaaacaaagagtcgtatctattcgccttaataataaagactatttcaagtgagggtcccactaattctacactatctattattttcccccaatgatgcaagccttttaatgaacatggcgcacatgttccactactataatatacaacaagtttaggtgctaaattttctatgtttattaccgtatcacgaccttctattttccatgtcgcatgaccaggtaaaataagattttggccataaatatctcttaaattttttgtttttctatttttcaaatcacatgaaaaaccaacaaaaagcaataaaaatacaactaatatattccttatcatcttccaatctacttgatttatacaaaataacccaatacaattataataattttcacataaacaaacaataaatacattattttttattataaaataattacaatctgaaggaaaacctctttcccgcacgacaagccgcaacctgcaccaaatcggatagccttgtcgccggcagccgatcaaaagcggcagacgtattccctgcaaaattttcccttgtcccgactgcgtcccgaatattttcgcgtgataaaacatgaataaatttacttttatccccgacttattcatacctttgccccgcaggtccgctccatcgccgcctggcaacagggggaggaaagtccgggcaacgcagagcgccacgcaagctaacggcttgatatccgtgagggtatagcaagtgtaacagaaaataaccgccccgcaggggtaagggtgaaaaggcggggtaagagcccaccgcgaaggtagcgatacgcttcggacagtacatctcgtgggttgcaagaccatgtataccggcaatcaagggttgctcgtccaatgccggggggtaggttgcttgaggcgccgggagaccggcgtcctagataaatgatggggactccgggcaaccggagcacagaacccggcttacagggcctgcaaaatcgaaaggctgcccgtcaatgggcagcctttttcgcaatcactctcccgcgacaatcctccacgataaaaaagatacgcaagccgccatactcgtccgggggcgcactcggctttcaccgcaacggcccgacgatgcgcggccgggcactcgactgctgccgcaaccggggccgagccggtacaaatcccggaaccccggaacgcccatcagaaacagggacggcggcattgcggaccggacaagccataacgctatactttttcccggcagcgaccttcatcgaccacccggctgtttccgggacaccccgcaccccgctccagcggttctctgggaccgcttttttattccgccccttttttccggccgtttttattgttattttgataacaaatgattatatttaaccacccgatcccgaaagaagctccgtttccgggatatttttcggcaggcaggagcgaacaaacctgaaaaatcaaactctaaacgaccggaaaacatggcaaaaataaacactccggaggaattgcgcctcatgcgcgaaaaactgcgtgccgacctcgagatccgggaaaacagcaacacacccgatgagctgccccagatccgggtttcgatggacgaatgcggcatcgccgccggagccaaagcggtcctcgcaacattcgtcgaagaactggccgcccgtcgcatccggggcatcgtaacccagaccggctgcgccggacactgcaaggacgaacccaccgtcgaaatcacgctgccgggccgcaggccggttctttacggccatgtcactgccgagcgcgtcgcggagctcgtcgagcggcaaatcgtccggggcgaaacggccgaaggcctgatcgaagcataaactgcgtccggcaatccgagaattttcggaaagaggcgacaggtccgaccgtcgagccgggcatctgaaacgaaggaaaacgatccgaatctttaacaagcatccaacccgatggcaaaaatcaataactacatcctggtatgcggcggcacgggatgccgggcatcgcggagcgaggagatcatcgcggccctgcgccgggcgctcgaccgaacgggagagtccgagcgcacacgggtgatccgcaccggctgcttcggcttctgcgagcaggggccgatcgtcaagatgatccccgacaacaccttctacgtctcggtcaaacccgaagacgccgaagagatcgtccgggagcatgtcgtcaaaggccgcaaggtagagcggctgctctacacggcccccgacacggggcagcacgtacccgacagcaagcacatgaagttctacaagccgcagctgcgcatcgccctgcggaactgcgggttcatcgaccccgagaacatcggcgaatacatcgcccgcgacggctacgcagccctggccaaagtgctcggcatgcagcccgaccacgtgttgcaggagatcatcgactccggcctgcgggggcgcggcggaggcggtttccccaccggcctgaagtggaagatcacgcgcgatgcgaaagccgaccgcaaatacgtggtctgcaacgccgacgaaggggatccgggcgcattcatggaccgttcgatcctcgaaggcgatccccactcgatcctcgaagcgatggccatcaacggctactgcacgggcgcctcgcacggactgatctacatccgcgccgaatacccgctggccatcgaacggctcaggcgagccatcgaacaggcgcgggaatacgggctgctgggcaacgacatcctgggctcgggcttctcgttcgacatcgagctgcgctacggtgcaggcgccttcgtctgcggcgaggagacggcgctgattcattcgatggaaggcagacgcggcgaaccgaccgtgaaacccccgtacccgagcgaatcgggctacaagggctacccgaccaacgtgaacaacgtcgaaacctacgccaatattccgcccatcatcctgcggggcgccgaatggttctcctcgatcggcaccgaaaagagcaagggcaccaaagtcttcgccctggcgggcaaggtcaataacgtcggcctgatcgaggtgccgatgggcaccacgctgcgcgaagtgatcttcgaaatcggcgggggcatcaagaacggcaagaagttcaaggccgtgcagacgggcggcccgtcgggcggctgcctcacggagaagcacctcgacaccccgatcgactacgacaacctgctggcaagcggatcgatgatgggttcgggcggcatgatcgtcatggacgaagacgactgcatggtgtcggtggccaaattctacctcgaattcaccgtcgatgagtcgtgcggcaagtgcacgccctgccgcatcggaaacaaacgcctgctggagattctcgaccggatcaccaggggactgggcagggacgaagacctcgacgaattgcagaacctcgcccgcgtaatccgcgactcgtcgctctgcgccctggggcagacagcccccaatccagtgctttcgaccctggaaaacttctgggacgaatacgtggcccacgtgcgggaccaccactgtacggcccaccgctgccgcgacctgatgagtttcgtgatcgaccccaaggtttgcaaaggctgctccctctgcgctcgcatgtgtccgccgggagccatcagcggcatccccaaacaaccctacgccatcgaccaggcccgctgcatcaagtgcggcacctgcctcgaaaaatgcaagttcggcgcaatcagcatccgctaaccactcctccaagacaaatccgcatggaaacgataaaactaaccatcgacaaccgaaccgcagaggtcgccccgggcaccaacctggtcgaagcggccgcttcgatcggcatcaaaattccgacgctctgctacctcaacctgcacgagctgggctgcaagaacgaccccggtgtctgccgcatctgcgtcgtagaggtcgaaggacgcaaaaacctggctccggcctgcaaaaccgtctgcacggaggggatggtcgtccgcacccacacaccccgcgtcatcaacgcccggcagaccattctggagctgatcctctcggaccaccccaacgaatgcctcacctgctcgaagaacggctattgcagcctgcaaaccatggccaaagacctcggcatccgcgaggccaagtacaagggagaaaccaccaagccgatgatggacctctcgccgtcggtggtgcgcaacatggaaaagtgcatcctctgccgccgctgtgaaacggtctgcaaccaagtccagaccgtcggcgccctgtcggtcgtaggccggggattcacttcggtcctctgcacggccttcaacgatccgatcctgacgaccaactgcgtcaattgcggccaatgcgtagccgtctgtccgaccagcgccctttcggagaacagcaacatccgggaggtgatgcaggcgctcgccgatcccggcaagacggtcgtggtgcagaccgcccccgccgtgcgcgtagccctcggccaggatttcggactggaaggccggagcgtcacgggcaagatgaccacagtgctgcgtcggttgggcttcgactacgttttcgacaccgacttcgccgctgaccttacgatcatggaggagggcaccgagctgctccagcgcctgaacaagtatctcgcgggcgaccggacggtcaaaatcccactgatgacctcctgctgtccgggctgggtgtcgttcatggagaagcatttccccgaactgggcgagaacctctcgacggccaagtcgccgcaacagatgttcggcgcgatcgccaaaaactacctggcgcccaagctgggcatcgaccgccggaatttcatcgtcgtatcggtcatgccctgcgtggcgaagaaatcggaagccgcacgccctgaattcggcaaagacggcgatccggacgtaaacatttcgatcaccacgcgcgaactggcccacatgatccgcttcgccaacatgaatttcgacgaactggaggagagcgatttcgaccgtccgctgggcgaatcgaccggtgcaggcgtcatcttcggcaccacaggcggcgtgatcgaggcagccgtgcgtacggcatacgaaatacaaacgaaaaaaacgcttccgaaactcgacttcaccgaactgcgcggactggcgggaatccgttcggcaacgatcgacttcgacggcgtacccgtcaaaatcggcatcgcacacgggctgggtaacgcccgcaggctggtcgaagagatccgcgccggccgatcgccctaccacgccatcgaaatcatggcctgtcccggcggctgcatcaacggcggcgggcaaccctatcaccggggcaacgaagagcttctgaaacggcgtgccgaggccctctacgccgaagacgccgccaaaccgctgcgcaagtcgcacgagaatcccgacattcaggcgctctacgaagagttcctcggcgaaccctgcggaccgctttcgcacgaactgctccacacccgttattacgaccgcaaaccggtcgtggaacccaagaaataagacgttatggaaaaaatatgcctctcccaacggagaatcgacgagataaagaacgtctgccgaaagtacggcaacgacccgggcgaactgatcaacatcctgcacggcgtgcaggacacgctgggctatctgcccaaagaggtacaggagctcatcgccctggagttgggcatctcggccgcacgggtttacggcgtggtgtcgttctattcgttcttcacgatgaagcccaaaggcaaatatccgatttcggtctgcatgggcacggcctgctacgtccggggcggcgagaaggtgctcgacgaattcagacgccagctcggcatcgaagtcggcggcacgacccccgacgggctcttctcgctcgattcgctgcggtgcgtgggtgcctgcggactcgctccggtcgtgatgatcggaccccgggtctatggacggctcaaggtgaccgatgtcaaaggtatcctcgacgaaatccaggccctcgaaaaagagatctgacgacgcggtattacgttaaataaaaaagaccgggcctgcacagaaatacaggtccggttcgttccctccggaacaaaagccgcctcaccgacaatcggttccaccagtccgaacgaaggcccccgcaacgatccgcagagcctggatgatcgaaaacaggcattttttcccgccataaaatgcaccggaacccccgctccgacatctgcaagccaacaggggctatgctcgaaccgggaaaaacacgcactccgtcacaaaagatttcgcggaaaagtcgtcaaaccggataatttggcgtacctttgcccgacaaatcatcataaatgaatcaattagaagaatttaaggctttaggactgtccgacgatatacttactgccattgccaaaaaagggttcgaaaccccctcggccattcagagcctcaccattccccacctgctcaccaccgacaaagacatcatcgcacaagcacaaaccggcacgggtaaaaccgccgctttcggcctgccgattatccagatgctgacttcccggcggaatattccgcaggccatcgtcctcgttccgacccgcgaactggccctgcaggtgacgcaggaactcatttcgttcaatacccacgacctttcgatcgccccgatctacggcggcgcctcgatgaccgaacagttgcggcgcctgaaaaaaggcatcgacatcgtcgtcggcacgccgggccgcatcctcgaccacatccgccggggcacgctcgacctctcggcgatcgcctacctggtgctcgacgaggcggacgagatgctcaacatgggtttcatcgaggatatcgaagagatcatgcacgccatgaccggccccaaacgggtgctgctcttctcggccacgatgcccgaccgcatcgcggcgctggcccgcaactacatgcacgaacccgacatcctgaaagtcgaatcgcagcacgtcaccaccgacctgacgaaccagatctatttcgaggtgcgcgaaggcgacaagttcgacgccctgacccgcatcatcgacgtcgaacccgagttctacggcatcgtcttctcccgcacccgaacgggcgcggacgagatcgtggccaaactcctggaacgcggctacgcggccgaagtccttcacggcgacatatcgcaggcccagcgcgagaaaatcctgggcaaattcaagaaaaaacaggtcaatatcctggtggctacggacgtggcggcccggggcatcgacgtaagcaacctcacgcacgtaatcaactactcgctgccgcaggattccgacagctacgtccaccgcatcggacgcacgggccgcgccggcaaccagggaacggccatcaccttcatctcaccctccgagatgcgcaaattcgggttcctgaagcggacgatcaaggccgacatcaagctggaacagctccccacgccggccgacatcatcgccaccaagcgcaacaagatcaaggaggatctggacgccatcgtcgagagcgaaagttacggcgaatgtacggggatggccgccgaactactggagagttatccgcccgaagtggccttgagcgccctgctgcgcctggccttcaagaacgagctgagcgagagcagctaccccgaaatccgctcgatcgacgtcgatcgcaagggcaaggcccggattttcctcgccttcggtgcccgcgacggctacgacacccgcaaaacggtccggctcctcaaacaggagtgcgaactctccgaccacgacatcgacgacgtacggatcatggaggacttctcgttcgcaacggttcccttcgaccaagccgaaaaagtcgtcaggactttgaataagctctcgcacggacgtcccatcgcggaaatatcgaaagacagcccttcggcccgcacatccggcggaagacaatcctaccgccgcagggagtccgacacccgatccggacgtaaaaccggccggaaacccgaaaaccgggaatcctatcgccaagactcctccgtgcaggaggctttcggtgcgcccgacgatcggaacggacatcggaaatccgtccgcagcccaaaaacgtccggcacgaaagccgggaagaaacccgcaacgaccgtcaaggcgagcagcaaaacgtacacaccggagaaaaccgctgcgaagagagcttccgaactccccgaaaactggttcgaagagtggttcggccagcggcaacccgcccgcaacaaaaaagggccgaaccggaccccgaagcgaaaaaacagagattaaacatcaaaccggctccccggccgaggcgggtcgttcgtccgcaggagatttggcgatcgtgaagctgaaggtcgccccttcgccatagaccgactccacggtcatctcgccgccgttgcgatgcaccaggtccaggcaaagctgcaaccccagtcccgacccctcctcttttccggtcccgtaagtggtgaaatacatcgcaggatcgagcactttattcaggtcttcgggcttgatgccgactccgaaatcacgcacccggacaacggcgtgggtcggggtttcggccgtggaaacgataatcttccctcctccttccgggctgtatttgatcgcattgctcaacaagttgcggacgatcgtcttgaccatatcgacgtcgcaccgcacgtgaatcggcgcgggaatgtcgtattcgacgacgattcctttggtccgggccaccgactccgaaattttcgaggaaaagagtacgacttcggccagatcgacatcctgatacaccgtatgcatcctcccggtctgacacttcgtccacttgagcaggttgtcgagcagtgaaaaggtgtcttcggcaatgtcgttgcccatgcgaagcatatcgaggttcccggctccgacccgctccgcatccaggctgtcgagcagggtgttgaacagcatcttgaggcttccgatcggagagcgcaggtcgtgggcgatcaccgaatacatcttgtcgcggctggccagggtcgcctgcagttcctcgttctgccgcacgatgacgcgctgcgcctctgcaataaacatatgatgcgccacccgcgtaatcagctcctcgtgattgaaaggcttcgacacgtaatcgctggcccccatcttgaaccctttgacaatgttttccgaatcgtggagcgccgagagaaaaatcacgggaatccggcagaatcgctcgtcggccttgagccgctcgatcacctcataaccgttcatgtccggcatcatgatatccagcagaatcaggtccggagattcgctttcgaccttttcgagcgcttcgcggccgcccgtcgcagtcacgatccggtatttcgccctgcccaatatcgctttcaacaacaagatattggtcgcaatgtcatcgacgaccaatatcttataattttcaggattgaccgtgagattttccataaaacagaccttgtgacacacaagcgaggtagataaccgctaacagatttcatcggagtacgaagaaattttccgaaacggcaaccgtatcgaaggcaaggaacgacagccgactatggccgaaaaacagcgcgtatcccgacgcggaaccgaatttacacggacgatctgcacccgattcggaggcgattcacttcaagaacttttcgatgcggaccttcagttccatcgggttgaagggtttgacgatatagtcttcagctccgtcctgcaacaactgaatacgctccgaagtactgtcttcgctcgataacataaccatccggatatgccggaaccgctcgtcactcttgacggcatggagaaattcatctccccgcatgtcgggcatacggatatccgaaataatcagatcgggcaaatctccggcctccatctgctcgagtacaggcttcggactgtcgaaatagcgacagtcgtagtcccgccccaggcaggccatgatgattttgccgatcatgtccttgtcatcgacaacgaatatcttttgcttgtccatattttcaacactttaatacgtctgaagaacacaaatttcgtacaaatagtcacttttttgtcacaatcgaaataattgtgtctaaaatcggttccaaatgtataaagaatatacacaaaaacgacaaaaatttgtcgttttcatagctgtttcctccgaataccggtgcatacaaacgcaaaataaccgtctgaaaatcatatatccttgtatgaaagtcggatcgctgcatatgggactaaccgacaaaacggttctgctcagccaacgctgcccggtaaaaataaactgcaacaaagagagagtagtagaatggatacggaggaatcaatgggaaatcataattttcatccataacctcataaccggctaatcgaaaacgaccggcaaccattcctcgaaaaaaatacatattatatttatacaaaacgaaaaccgcgttgcagctatctgcaacgcggtttctgtgaggtctgaagcggattcgaaccgctgtacaaggttttgcagacctttgcctagccactcggccatcagaccctgattccctggatcgggtttgcaaatatacgaagatttctcttttctgcaaaacttccgggcaactttgcatttttatcggcaaaaacctatctttacaaccgctaaccgaagccccgaagcgggtccggaacctacggtttcgcccaaaagaggcggagccgaactcattcggggattgccggatacggaaaatgaagcgcgaaattccagacatagcccttaccctcacgccgggaataggcccgaaaggggcggtccatctgctcgacgtattcggttcggcagaggcggttttctccgcttcggccgacgaactcatcgaaaaagcccgactccgaccggaactcgcgcgggcgatcctccaaaagaaagcgttcgcagacgcagagcgcgaagtcaaacattgccgcaaacacgggatcgagatcatcgcctccaccgacgcacaatacccggccctgctgcgcgaaaccgccgactacccgcatgtgctgtatgttctgggttccccggaagcgctcggcaagacgacgcttacgatggtcggcacgcgtcggatgactccgtacgggcaacagatggccgaccggctgatcggcgaactggcagaccgggtggcggatacggtgatcgtgagcggcctggccttcggcatcgatacggcctgtcaccgtgcggcgctcgctttcggcatgccgaccgtcggcatcatcgcctcggcccttcccggcatcacgcccgcacagcacacggccgtcgcccgggatatgatcgaacacggcggagccgtcgtttcggagctgcactcccaaaccaggcagaacggcaacttttaccactcccgcaaccgtctgctggcaggcataagcggcggtacggtcgtcgtagaatcgcccgtcgaaggcgggtcgatggatacggcacggctggcggacggctacaaccgcacgctgatggccgtccctggacgcgcgacggacttcgcctcggccggagccaatctgctgattcggacccagcgtgcccaaatggtatgcacgggcgaagatatcgtgcgggaaatgatgtgggaccagaaccgccccggcgatctgatcgaccggccgacagcggctcccgcagcactcacgcgcgacgaagaggggctgctgggctgcttccgcaccgacgacccgatatccgcagaagagctttgcgaactctcggggctcggattcggcgaactttcggccctgctgctgggactcgaaatggccggagccgtccggcagcttccggggaaccgatatatgaaactacgctaataaaaaataaatacaaaatacactatcccaatcctatgaaacaattcgtcatcttatttcttttatttactatcagcccaatcagtttcacttttgcacaaaacaaaattttctgtgaaattattgaacaaatcgtaagtcagaaaaaaactcgaatatacctcgattacgggcaagaacgcaataaaaagaaagatatcagactcgaaaacgaatgaaaaagctgaaatcttctattcccgggtggaagcacttaacattatgtccgcattgggttggaaattcgagcaagcatatgtaaaagtatctggaagcagcggaaacggatatggcagtacatcaagtacaactcactacttgttgagtaaagatgtagattcaattcaggaaataaacaacattattgatgaaataaaagcaaaaaaatccgaattaaataatatacccaccgaatcagaacaacgagacaccaactctataaacaaaatattttaagacaaaatttccgaaacattgaattatctgatcgacacccactcgcatatctacgccgaagagttcgacgccgaccgcgacgaggcgatccgccgcgcccgcgaagccggggtggagcggctgctgctgccggcgatcgactccgagagccacgggcgcctcttcgacaccgtgcgccgctatccggaccactgcaccccgatgatggggctgcacccgacctccatcaacgacaatccccgttggcgggaagagctggcgttggtcgaacgctacctctgctcgccacccgaaggcgtcggacgattctgcgccgtgggcgaaatcggactcgactactactgggacgaccgcttcaaggccgaacagctcgaggcattcacgaaacagtgccgcctggccgcgacctatgaccttcccgtcgccatccatacgcgggcggcctggaaagatatgtgccgcactgtcgaaacggaaacgaaggccgcccgcgaaaaagggctgcgcctgcggggtgttttccacgccttcgccgaagacgccgacacctaccggcagttgaaggagtgcggcgacttcctgttcggcatcggcggtgtggtgaccttcaaaaagagccggctggccgataccgtacgcgaaatggagctcgacgacctggtgctcgaaaccgactgtccctacctgacgccggttccctatcgcggccagcgaaacgaatccggatatattccttatatttgcaacaaaatcgcagcgctgaaaggcacgacacccgaagaggtagcggcagccacgacccgcaacgcccggcggatgttcggcttcgacgcggcgcgacagacgacaaacgaccattcaagccctaccgaatcgatatgaaaccttcgatcctgattatctataccggcggcacgatcggcatgaagcccgacccgactaccggcgccctcgtaccgttcgacttcagcggcatcttcgaggagttcccgaccctccaaagcctgaacatcggcatcgaggtattcacgatggaccccgtgatcgactcatcgaacgtcagcccccgcaactggctcgacctggcggcgatcatccgcgacaactacgcccgctacgacgggttcgtcgtgctgcacggcaccgacacgatgtcctacaccgcttcggccctgagcttcctgctcgaaaacctggccaaacccgtcgtcttcaccggcagccagattccgatcggcgtgctgcgcaccgacgggcgcgaaaacctgatgacggccatcgaaatcgcttcggcccgcatcgacggccgccccgccgttcccgaagtgtcgctctatttccagaactgtctgttccgcgccaaccgcacgaccaaacgcagttcggaagacttgagcgccttctggtcgtacaactatccggccctggccgacgtgggcgtcaatatcacctaccacaccgaatacattctccagccggagcgctacgacgaacccctgcacatcgccgcccgcctgagcggaggtatcgccgtcgtcaagctcttccccggcatcgaggaacggaccctgcgcgcgatgctctcggccgaagggctccggggcgtcgtgctcgaaaccttcggcgcaggaaacgccccgaccagcgaatggttcatccgcgtgctcgaagaggcgatcgaccggggactgatcgtcctcaacgtcacgcagtgccggggcggtcgggtcatgatggaactctacgaaacgggactccgcctgcagcggatcggcgtgctctgcggccacgacatgaccaccgaagcggccgtcacaaaattgatgtacgtcctcggactcgaactgccccgcgagcaaacgctcgacctgctccgcacgcccctcaaaggagaatttaccgactaaaacattgtgcgtacgaaaataattttgtatatttcggagctaaaaatcgcatcgacagggtctcggagagaggcacgcagactgtccgaaaaaggataaaacattaccgctcaattcattgcagagaatattactgccgaaaagagaaaccggggcatttttccgaccagacagccggattgtcgaaaaaagctaaaataaaacgaatttgaaccgcgataagccagacaggacaaaaaaaaattacattttttgaaataaaaaacgcaaacgaaaaaacgatcaactaatcaaaattttaattaaacaaccatgaaaaaactttttttgattgtagcagtcgccatcttctcgcttggtactgttaacgctttcgcccaggagacgactacgcctgcaaccgaggagaccgcagtcgttgaagaaaccgtagtggacgaagttccggcttcggacactcagcttgccgaagctaagccgatgcaccaggtgctgatgcagaagttcctcgaaggcggttgggagtggatgcttccggtgctcctctgcttggtattcggtcttgccattgccatcgagcgtatgctttacctgagcctttccaccatcaactccaagaaactgatcgcacaggtcgaagaagcgctgaaaaagggcggtatcgaagctgccaaggaagtttgccgcaacaagcgcggtccggtcgcatcgatcttctatcagggtctggatcgttacaaccagggtttggacagtgtcgagaaagccgtcgtttcctacggttcggtacagaccggccgcatggagtcgggcttgagctggatcggtctgttcatcgcacttagcccgatgctcggatttatgggtaccgtcgtgggtatgatcgaggcgttcgacgccatccaggctgcgggcgatatctctccgacgctggttgccggcggtatcaaggtcgccctgctgaccaccctgctgggtcttatcgctgcggttattcttcagttgttctacaactatatcgtttccaagatcgactcgctcgtaaacgatatggaggattcgtccatcaccctgatggatatcctgacggcttacaagaaataattcgcacttataaagactttattccctattatgaaaaaaatattaaacatattgctgggcgtcatcctgctgattacggtgattctgaccgtatatgcaatggtggccggcggcagcaacgaggcgatcaacctgaacctcatctggagttatatcctgatcgcagtcggtattgcaacagcactgttcacggccgtttggggtatggtcaacagttccaaaggcatcaaaggaacgctgctttcgacacttctgatcatcgtcatcgtcgcggcagcctacctgatcgcccgcggacatacgatcgaaattccggacgtcgcgaacggaggcttcttcccgcatcctgaaaccgttatcacggaagccagcattctggtaacctacgtagctctgggtgccgctgttctgacagctattttcacagagatatacaaagctttcaaatagagtttgaacgatgcctatagataaaagaaaagtacaggagatcaatgccggttcaatggccgacatcgctttcttgctgctcatattcttcctggtggctacgacgatgaacgtcgatacgggtatcgcccgtaacctgccgccgatgccccccgaggatcaaaaggtcgaggatatgaaggtgaagatacgtaaccttctgcccgttctggtgaacggccgcggcgatatcttcgtgggcagggccggcgaacaggagtacgtcgatatccaccagttgaaggaccgggcgaaggacttcctcctcaatgtgatggacgatcccaacctgcccgaaaaagaggtcgaggagttcgagctccccgacggcagcaaatggagctatccggtcggaaaaggcgtactctcgctgcaaacgaccaaagatacccaatatcagatctacatcatggtacagaacgagctgacgcgtgcgatcaacgaaatccgtgacgaagtttcgaagaataaattccaaatgaaattctcggatctcggagaagcggagcgcggtatcgtagccaaagccgttcccatgagtatctcggaagcagaacccagagatttaggaggaaaaaagtagtatggcagtaattaaaaagaagggcaacaaaagtttgcccccgatctctaccgcctcgctgccggacgtgatcttcatgatcctgttcttcttcatggtatctacgaccatgcgcgatcaggaattacatgtaaaataccaagttccagaagcaaccgaggtgcagaaactggagaagaaatcactcgtaagttacatccacatcggagagccgatcggcgtttggcgggaacagtacggtcctgcaccccgtattcagctcaacgatgccttcaaaaccgctcaggatatcggccagttcgtagctgccgagcgtgacaagctcaatgagtcggagcgtgccttgatgacgatctgtctgaaggccgaccgatatacgactatgggccgtatcacggagatcaagcaggaacttcgccgcgcgaatgccctgaaaatttcctacgcggctgcgaaaaccctgggatactaatttcaggaaggattcattcccgaaggggatgtgtcaaattgagaaatttggcgcatcccctttcaggtatgtaagaacagacatcgaggttcacggcgaagaacgtgtcctgaccgtacataatcgagccgcgataccgataataacgaagcggtttgcctgttatgatacaccgtctttttattcgccggttcggaaagagcctcgggataaaaaacaaaaaaacagaaagatacaggacaaacagggccaagcccacgatcgagcgccaaaaaagaggtcgcaagagcgggaatcggaaaccaagccgaaacagaaaaaacggggcgattaccgacactcctactcctactcctactcctactcctactcctactcctactcctactcctactcctactcctactcctactcctactcctactcctactcctactcctactcctactcctactcctactcctactcctactcctactcctactcctactcctactcctactcctactcctactcctactcctactcctactcctactcctactcctctaccctcccttccggacttctccgacacgagctacgaaatgtttccgaaccggcaaaagaaaaccccgcaacatatagaatgcggggttttcttttctcaaatccttaaaacggctaaaaatgagccataaattccaggacgatcttgtcgtgttcggaaactttggggacgacacccttgtcgtaaaaatacatctcatagttgagccggatatcggccataaaaggcaatccgaagctaaacgtaatgcctgccgtgacgcgatgacgctccagatcattgacgaacagcaaaccgttgtcgtcgggaatgccgttgctgtgatcggacatatagtcgtaacggcctgcgaacgacatctttttgaagacacggcgcaagggcaggtcataacagaaaaatccgtcgaaagcattcacgcccgcgaacgaattgcgggcatactccttacgcagatactcggcctcgaagaaccaaccgcccagacggtaggagcaccccacgtcgtagaggtgaatccgcgtatcggccggacgggtcgtctggtagctcaccacgaaattcattccctcggcaaaaccgaactgcgcctttgccgcatagttgaatttgtcggtccaaaaatccttctggtcgtcgatacccgacccgttgaacatgccgacttgcaggttgatcggaaccttttcgccgaatttccagcccagagtggctccgacatcgcggacgctgcccacctgcttggcgatgaacgaacggttcgcaaaatactgcgtatggggcgaacggtgggcatcgatggtaaacggcacacgcatgtatccgatcgtgaaaccgaggcccttataaagtttggttcccagatacgcattgaccatcttgatctttccctcgtccgagaggtcgatctccatacagtaagccagtttcgaatagatctcgccggccacgccgaagcgggcgttgcgaacctggaagcgggcatcgccctcaccgggctggtactcgaatttggcccggagcgttcccagcaggtcgatcgtcacgggtggagcctttttctcctccttttgtgcacccgaagctgccgaaatttcgaaatgagtctgaactcggactccttcgtcctcgtcatcatcctcatcgtcgttctcacgaccgtcgcccttgtcacgcctcctgtccttctgcgaaagctcgccctgcccgacgttctcgtcctgcccggcatccgtccgcaccgcagcggcacgatcgtcgtcatccgtatcgacatctttttcctgtttcgggtgattcgtactctccggctgcgactcgatgaccatctcttccagatcgtcctgcacgggtatcgtttccacatccaccctctccaccggaggttgctgggccgctgcggacaacgacatactcatcgcaaggcataataaaaaccatccggccactctgcgggtaaaattctccataggcaactctattctcttttatcttgtcgtcagatacgggccacaggcataatacattgattgaaacctatttaaccctttcaaaatatctcgtgttccgcaaatatagacaaaaacagtgcaaatgacactgtttttgtctatcgcaggttcaaaatacgacttattacttatttggtaaacttattacaagccttcagcaactgacgcaacgtatcgaccaattcctgggactcctgcagcgtaatcagatagacgagcgaaacatgcaggctgttgccctcctcctgcacccggtacatctgggtcttgcgctcggtcgagatggattcgcgcaacccttcggcttcgatcagcacgttttcgatatccgaatagtcgttctgctccatcatgcggcgaatctcgaccatcaggttgaaaatccgggtccgaatgggcaggaactcccgcagataaactttgggcatcgggttgaaattattgccgacatgctccctgcacggttcgcaaagacgtttgaggcagtaataaagctgctcggaggcgttgctcgccgtgtggaaccaggtattcttttcgagcgccaggttacgatcgatgcggcgcatggcgagcatctgccgacggcgtacccgcttgagcaggtccttttcgcccccgagggctttttcagccttgcgcaaactcttgatatcctctttcagcagaccgtcggtaatctgacggaacgtcgattcggcgaacgtcaccgatgccatgagcgactcggtcatatgccggcgcaacagcgtccacacctcggccttgtcgcgcgaagtcatcatacccttgaaaacatcatcgtgctcggccttcatcttccggcggtagcggacattgctgcgaatcaggaaaagaatcgtcagcgccacgacaacgatcatcgcaatcacaccgccgtagtagatggccagcgcgagcaggaacgtcgccacgaaagccgcaccggccgtaatgaaccagccgccgatcacggaaatcacacccgtaatgcggaatacggcgctctcgcggccccaggcccggtcagccagcgaagaacccatcgccaccataaaggccacgtaagtagtcgaaagaggcaacttgagcgaggtgcccaatgcgatcagcaagctggccagcagcagattgaccgccgcacgtaccatatcgaaagcggcaccgttctccagaatcgcctcgtccttatcgaagcgtttcccgagccagcgcttcagtccctgcggcatcgcattgtcgattccggtagcgagggacgacgaagcacgcacgatactccgggccagccccgacgaaccgaacatctcgtcgccggcatcctgacgggccagatccaccgaggtcttgataacgccccgggccttccgcgaagtggtcagggcgacgatcatcaccacgcccgaaagagccaggaaaatgaagggcgtccgggcaggcgcattcagcgaatccatcaggaaggtttcggacccgttgccattggcgacgtaatccatataggaagagtagcccgtcagaggtacgcccacgaaattcaccaggtcgtttccggcgaaggccagtgccagggcgaaagttcccagcagcgtgactaccttgaaaatattgatccgacaccagtggagcacctgcgagagaaggcagaagaagatgaagcagccggccaccaggtgacgggtataggtagaaatccactccgacagttcgggtgtcatgaacgacgaatccttcatacccttgatcagaatgaaatagatgatcgccgtcatcgccacaccgccgaacagcgcggcggaccacttcatgtgcgacttataattgaaagtaaagatcaatcgggcgatatattgcaccactgcgccgaatacgaatgcgatcgccaccgaaaggaagatggccatgatgaccgacaaagccttttccgaattcagcatatcggcaaaggtaagccccgtatcgtctgcggccagcttgaccatcgccagagcgaacgcacctcccagcaactcgaaaacgatcgacacggtagtcgaagtcggcagccccagggtattgaaggtgtccagaagaatcacgtcgattgccatgaccgccaggcagatacacatgatatcctggaaatagaactgttcgggcctgaaaatcccgtgccgggcgacatccatcataccgttgctcatgacggcgccgcacaggatacccaccgcagctacacccatgatccacttgaacgaagcggctcgggcgccgacggccgaccccaggaaattcacggcatcgttgctgacacccaccaccagatcgaaaatcgccagcagaaagaggaagaggacaatgcctaaatagattgattccatacttttttaattggttttacgcctaaagttatcattcggtgacaaaagtaccgggcggaaatgataacgacgtttcaaacctgttacaaacccgttacaaaatccgggaaatgcctcgtttttatgaaccgtctgttacaattccgtgaaatttcgatccttccggatttgcgaaaccgttttattccctaattttgacgcgtcgaatcaatacgaaggtcatggggaaatacaaaattctggtggtggacgacgaagagtcgctgtgtgaaatcctgaaattcaacctcgaactcgaaggatacgaagtggatgtggcttacagcgccgaacaagcgctggcgatgcatcccgaacgttattcgctgctgctgctcgacgtaatgatgggagagatcagcggcttcaaaatggcccgtatgctcaagtcctcgcccgaaacggctgccgtgccgatcatcttctgcacggccaaagacaccgaagacgacaccgttgctggcttgaacctgggtgccgacgactatatctccaaacccttctcgatgcgcgaagtgacggcccgggtacggagcgtgctgcgccgctcgcaagcccggcaggaggaggaagccatctgtttcgaagggctctgcctcgacctgcagagcaaggtctgccgggtgaacggacaggaggttcccctgaccaaaaaggagttcgaaatcctcaccctgctcctttcccaccctagggtgatcttctcgcgcgaacagatcctcgcccgggtctggaacaacgaagtgatcgtcctggaccgcacgatcgacgtaaacatcacgcgcctgcgcaagaaaatcgggccctacggctcgcatctggtgacccgcctgggctacggctatggatttgaaaagtaaacactcctatcagacgcaatcgttcctctggctgctgggcttctcgtggctgctcatcgtctgcttcgtcggcttccaataccaccgggagaaggagctgcgcacggagctgctcgattcgcagttgcagatcatcaacgcccaactggaagaggctttgagcaatgcacgcactccccacgactttttcgatgcgcactccgacttcttcgaggggctgcgcatcaccctgatcgacctggacggtacggtcgtctatgactccgaagaacccccggccgagatgtcgaaccacctcgaccggccggaagtggcggccgccctcaccgacggtcacggctatacgatccgccgccagtcggagaacaacgggcgcacctacttctactccgcctcccgcatcggcgaccggatcgtccgctcgtcgctgccctacaccgtgtcgttgtcgcaggtgctgaacgccgaccgcaactttctgtggttcatgggttcagtcaccctgctgctgtgtctggtcggctactacgtggtccgccagttcacgaaaaacatggttcaaatggaggcgaccctcgcagagcgcgaccgcgaacatgccgccgcactgcacgaggagcaggaaaaaatccgcatcaagcggcaattgaccaacaatatcaaccatgagttgaaaacccccgtaagttccatccacggctacctcgaaaccctcatcgccaatccgcatatcgacgcagcgacgcagcgggccttcctcgaaaagtgtttcacccagtccgaacggctccggcaactgttgcaggacgtatcgtcgatcacccggctggacgaaggaggacagatgatcgaccgtaccgaagtggacctccgcgccctgatcggcgaagtgataaccgacacggccccggaaagcgcccgacgcggatttacggtacactggacatgcgaccgtcccctgacggtcgagggcaacgaaggattgctctactccgttttccgcaacctgacggacaacgccctcaactactcgggcggcaaccggatcgacatcgccctgacggacgaaacggacgaccgctacgaattttcattctcggacaacggcacgggcgtcaatcccgaacacctgccctacctcttcgaacgtttctaccggatcgacaaggggcgttcgcgccgggcgggaggcaccggactcggcctggcgatcgtacgcaacgccatacttttccacggcggccgaatcgaagtggcgaaccgcccggaagggggactcgtgttccggttctcgatcgccaagaagggggaggcgaagagatagccgttccccttcgaaatcccttgcaggcagtttcaacccacaaaggcccggttcccgcacggattcaagccctgaaactgtgccgcgcagaacttccgaaagcccctccggagaaaacggcatagcgtaagtcgaaatcacacaaaggacatatcgccgaagacaacagtccgaagcaccctgccgcatgcactttccagatagaatcccctgccgcccgatcgggcggcaggggattctattctgtcgaaacggggcatcagtgcgcttcgagccaattgtcgcccacgccgcagtccaccaccagccgcacgcgcagcgcagcggcggactccatggcctcggtaacgatggcgatgacgcgctcctgctccgaacgaagcatatcgaccaccaactcgtcgtgcacctgcaggatcaccttcgagcggataccctcctcgcggaaacggcggctcacgcggatcatggcgatcttcatgatgtcggcggcgcttccctgaatcggggcgttcacggcgttgcgctcggccaggccgcgggccacggcgttgcgcgaagcgatgtcgttcaggtagcggcggcggccgaagatcgtcgaaacatagccgtcgcgcttggcctcttccaccacccggtccatgtactccttgaccttgggataggaggcgaaataaccttcgatgatctccttggcctccttgcggggaatgtcaagccgctggctcaggccgaaagccgaaattccgtaaataataccgaaattggcggtcttggccttgcggcgttcgtcgctgtccacctcggccacctctttgccgaaaagccgtgcggcggtggccgcatgtacgtcctcgccgtgttcgaaagccgcgatcagcgactcgtcaccgctcaagtgggccatcaggcgcagttccacctgactgtaatcggccgaaagcagcaggtgctcgtcgtccgaagggatgaacgccttccggatccggcgtcccaactcgtcccgcacgggaatattttgcaggttgggattggtcgaggagagccgtccggtagctgtcacggcctggttgaaggaagtatggatcttgcccgtcgccggattgaccagtagaggcaacgcctccacataggtcgaaagcagcttcttcacgccccggtattcgagaattttatcgacgatctcgtatttgtgggcgaaggtctgcaagtactcctcctcggtcgaaaactgtttggtccgagtcatcttgggcttctccgcgatgcggagcttcccgaagagcacctcgcccaactgccgcgccgaattgacgttgagcgacggctcgtccgccaaacggcggatctcactctccagatcgttgagggttttattgagttcgacggcatactcggccagcgcctccgaatcgatccgcaccccggccgtctcgatctcggccagcacagcgatcatcggctcctcgacctcgaggtaaagccctccgagtccgagttgttcgacctgcggccacagcacctgtttcaaacgcagcgtcacgtcggcatcctcggcggcgtattcggccacccgctccagcgaaatcatgtccatagtcagctgccgggctcccttgccgatgagcgaagtgatcgaaatcggccggtaattgaggtagcgcatcgccagcgcatccatgttgtgacgcgactcgggatcgagcaggtaatggaggatcatcgtatcgtaaagccggccgcgaatctcgacccccaggcgagcgagcaccatcaggtcgaacttgatgttctgcccgatcttggcgatcttttcgtcggcgaacagcggccggataagggccgcatattcggccgtattggattcattgaacggaatataccacgcctcgtaaggacgtaccgcgagcgaaagccccacgatccggtcgttgaaaatgtcgaatcccgtcgtttcggtatcgaaacaaaactccggacaggccgccacttcgcgcagaacagcctccagctcctgcgcattgcgcacgatcgtataggcgtggggtgtggtttgcgccgtggcgaactcctcgctttccgccgtctgttcatcggacggcgccgatccccggtcggatgccggggattccccagaatcggctgcgggggcgaacagatctccctgccccgccagcgcagcttttttagcggctgcggacttcgcacgcgccacctccgccaactgggtctgggccgcctgacggggcccttcgggcagcggttcggcaggagctaggttcgtcagatcgttcaggaatatccggaaatccagctcggcgaaaagggccttcagctcgtcgatcctgggggcgcacaccgtcaaatcttcctcccgaaagtcgatcggcacgtccaggcagatggtcgtcagccgcttggccaacaggagtttgtcgccccactcggcgatcttctcaccctgccggcccttgatccgatcggcgttttgcaggatattttccaccgtcccccactcctgcaccagcttgcaggcggttttttccccgatgcccggcacgccgggaatgttgtccgaagcatcgccccacaacgccaggatgtcgcgtaccaactgcggattctcgatgccgtatttctcgcggatcgcctcccggccgacgatttcgataccgtcgttgcctttctgtttgtagatcttacagttgtcgcaaaccaactgtccgtagtccttgtcgggcgtaaccatgaaaacgtcgtaacccgcctcgacgcccttgtatgcaagcgtgccgatcacatcgtcggcctcgtaaccgggcacctccagcaccggaatacacatcgcctcgacgatccgcttgacataaggcaccgacaacaggatatcctccggcgtttcggcacggttggccttgtattcggggaaaatttcgcggcggaaactgccgcctttcgggtcgaacgcgacgcccagcaggtcgggatgttcccgtttctggatgtcgcgcagaaatttcgtgaaaccgaacaccaccgaggtattcatccccgcacgattgcgcatgggacgtcccatgaacgcataataatacttgaaaatcaatgcataggcatcgacaagaaagagttttttcatcggattctatcggttatcctcggccatccactcggcgaacgaagtcgccgtttcgtgcagacgcagggcgtggagcttgacatgggacggcaggtcggcttcgatgcgggcggcgaaatccgcgagcatattctcgcacgtaggctgataatcgaccagcacgatgcggccgaagcgacagccgatctgttccgctacacgggtgctttcggccgtgcggcgcatgacgaaagcgtggtcgaggcgggagaggatctgttcgttcacaatccgtttcagctctccgaaatccatcaccatgccgaacttgggattcgactcgtcggcgcaaggcgtccccttgaccgtcacgaacaggcggtaggagtggccgtgaatctcgcggcaaaggccgtcgtaaccctccagcgcatgagccgcctcgaatgtaaactccttggtaagacgaatgatcgtcggttttttctcattttccatagcctctgcaaggtagtcacaattttcgggattcgcaaggatgcaggacccgggagccataaaaaacgggacgcacccgcaggcacgtcccgtcgtttcctattcccgtcctcttttcaacgctccgcagcccggatgaaatcgatgctcacctggcgttggaaagcctcgttgagcgaaatgaaggtctgggtggtcgaaatgccctggatacgcagaattccgtcgaaaatggttttcatcaggtgttcgttgtccaggcagtagagttttaccagaatgttgaaatttccggtgatgaagtggcactccacgatttcgggaatctccttgagtttctccatcgtctgcatcatatacatcggatcctgcacgcaaataccgatcagagcgcatacgtcgaaacccagcatcttggggtccacgatcaggcggcttcccaggatcacccccgaatcgtgcaacttgcggatacgctggtgaatggccgcacccgaaatcccgcactcgcgtgcgatctcgaggaacggcatgcgtgcattccggacgaggtactggagaatcttcccgtcgatagcgtccaaagttgccttagacatggaaaaactcgttttagtcggttgtaaacttatttgattacgttcatctccttaccgatcttcacgaacgctgcgatgcaacggtcgagctgctcggtggtgtggccggccgaaacctgcacgcggatacgggcctgtcccttcggcaccacgggatagtagaagccggtcacgaagataccctcgtcctgcagacgggcggcgaaatcctgcgacagtttggcatcgtagagcatcacggcgcagatagccgactgcgtaggcttgatgtcgaagccggcggccatcatacccttgcggaaatgctcgacgttcttcacgagcttgtcgtgcagcgcatcgctctcgccgagcatcttgaacatctcgatcgaagcacccactacggcagggggcagcgagttcgagaagaggtacgggcgcgaacgctggcgcagcatgtcgataatctccttgcggccggtggtgaaaccgcctaccgcgccgccgaaggctttgcccagcgtaccggtcaggatatcgacctgtccgcgcaggttgtagagttcggtgataccgcgaccggtcttgcccagcacgcctgccgagtggcactcatcgaccatcaccagcgcatcgtatttctcggccagcttgcagatctcatccagcggagcggcgttgccgtccatcgagaagacgccgtcggttacgatgatgcggaaacgctgtgcctgggctttcttgaggcaatcctccagctcggccatgtcggcgttggcgtaacggtagcgaacggccttgcacagacgcacgccgtcgatgatcgacgcgtggttgagcgaatcggagatgatcgcatcctgctcggtaaacagaggctcgaacacgccgccgttggcgtcgaagcaagcggcatagagaatcgtatcctcggtaccgaaatagtcggcgatcgccttctcgagctgcttgtgcatatcctggcaaccgcagatgaaacgcacggacgacatgccgtagccgcgtgtgtccatcgccttcttcgccgcttcgatcagacgcggattgtccgaaaggccgaggtagttgttcgcacagaaattcagcacctgacgtccgccgaccgtgatctcggcacgctgcggggattcgatgatgcgttcgttcttgtagagccctgccgctttgatttcggccagctcatgctccaaatgttctttaattttaccgtacatattgttagattttgtgacgttcgaggggtgttttactatcaaactatcagcaaagatagttgttttttataaaaatgatacctgtcgccgaattttttatccgatcgccgccggaccccggaccctccccgacggcaacccctgcaaatcccgggccccgcaaggcggtatccggcaaaatccggcccggattccgcaagtttgcgaccggtcgccgaagtcgtccgcgaacgaaaacggaataaacggacaacccgctatgttccaccgaaaacagagcgccggcacgaggcaaaaggacaaattccggcatcggaaagcgatccgcaggatcgtttcccgcccccgcaatctcaaattccccggcggacacgacgcatttacaaactattttgctaaatttgtcacgttatagccggttgtggaaccagcacgttcaaccattaaatatttcgaattatgttcaaaatcgattcttacgatttcaaaggcaagcgggcgattatccgcgtggacttcaacgtccccctcgacgacaagggccaggtaacggacgacacccgcatccgggcggcgatccccacgatccgcaaggtactcgacgcgggcggctcggtaatcctgatgtcgcatctgggacggcccaagaagaacaacgatatgaaatattcgctcggacagatcgtccccgcgatcgaaaagctgctgggcaaacccgtgattttcgccggcgactgcatgggagaaaaagcggccgaaacagcccggaacctcaaacccggcgaggtgatgctgctcgaaaacctgcgtttctacgccgaggaggagggcaagccccgcggactcgccgaagatgcttcggaagaggagaaggccgcagccaaaaaagcggtcaaagcctcgcagaaagagttcgtcgagcggctggcctcgtatgccgactgctacatcaacgacgctttcggcaccgcgcaccgcgcacacgcctcgacagccctgatcgccgataaattcccccacgacaagatgttcggctacgtgatggagaacgaattgcaggcggtcgatcgtctgatgctgaacccccggcgcccgttcgcggcgatcatcggcgggtcgaaagtttcgaccaagatctcgatcctcgaaaacctgatggagaaggtcgattcgatcgtcatcggcggcggtatgtcctacaccttcgcagcggcgcagggcggcaaagtcggcaactcgctctgcgagccggagatgttccccacggcactcgaaatcgtgaagaaagccgaggagcgcggcgtgaagctggtattctcgcccgatgcgctgatcgccgacaaattcgccgaggatgccgatacgcgccaggctccggtgaacgatatccccgacggctggatgggcctcgacatcggcgaggagggcaagaagattttccgcgaacacatcctgggctgcaagacgatcctgtggaacggccccgtaggtgttttcgagatggacaagttcgctaccggctcgaaagccgtggccgaagcgatcgccgaagccacttcgaaaggagccttctcgctcatcggcggcggcgattcggtggcctgcatcaacaagttcggcctggccgacaaggtgagctacgtctctacgggcggcggcgcactgctcgaatacatcgaaggcaaggagctgccgggtgtggcggccatccgcaaataagccgggcacgaacagagcgcggtcccatcgaaccgctctccgtactgaatcgaaaacagacagaaaccttaaaatatttagagtaaacaaccaatgaaaaaaattcttttcgctgcaaccgttctttgtatgatgggctgccaaaacaaaccgaccaactcgacgccggcgctcgatccgtccaacatggacacctcggtcgcccccaacgagagtttctaccagtacgccacgggcggctggcaggctaaaaatccgctcaaacctgaacattcgagctacaacatgttcaacgtgctgagcgacaacaacgagattcgcatcaacgagctcttcacccagatgaccaaggagaaccctgcgaagggcacggtcaatcagaaaatcgccgacctctacaagctgggcctcgactcggtacgcctgaacaaggagggcgccgctcccgtcaaggccgagctgaaaaccatcctgtccctcgacaagaaggaacaactcactccgatcctgtccgtgatgcagctgacttcgagctcgcccctgttcagcttcggtccccaggccgatctgaaggacagcaaagtcaatgccctctatatcggacagtcgggtatcggcatgggtgaccgcgactactacctcgacgccgagaacgaatcgatccgcgaagcctacaaaacttatctgaaccggctcttcacgctggccggactcgaagagtccgaggcaggcaaggcgaccgacgccgttatgcgcatcgaaaccgaactggccaagaacatgcgttcgaacgtcgagctgcgcgatattcagcgcatgtacaacccgatgacgaccgccgatctgaaaaagaactacgacgccatcgactgggcacagctcttcgcattctccggaatcaatcccgagcgtgtgatcgtctgccagcccgaatacatggaggcgctgaacaagctgatcgaaaccactccgatcgaagacttgcgctactacctggcatcgcaatacctcaacgccgcagcaccctacctggacgataacttctacgccgcatcgttcgacttctacggccgcacgatgtcgggcaagcaggagccccgtccccgctggaaacgtgccatggccattcccaacagcgccctgggcgaggccgtaggcgaaatgtacgtcgagaagttcttccccgccgaggacaaggcccgcatgatgaccctggtggagaatctccgcacggccctcggccaacacatcgaccagctcgactggatgagcgactcgaccaagatgcgcgcccgcgagaaactcgccgctttccgcgtaaaaatcggctaccccgacaagtggaaggactactccacgctcgaaatcgacccgaccctctcctactgggagaatatccagcgtgccagcgaatgggcgacccgcgatgcgcttgccaaaacggataaacccgtcgatcccgaagagtggcacatgactccgcaaacggtcaatgcctactacaacccgaccaccaatgaaatctgcttcccggcagcaatccttcagccgccgttcttcaacccggcagccgacgacgcggtgaactacggcgctatcggcgtagtgatcggacacgagatgacgcacggattcgacgatcagggccgtcagttcgacaaggacggcaacatgaacaactggtggaccgacgccgatgccgaagccttcaaacagaagaccgacattctggtcaagcaattcgatgcgatcgaggtgctgcccgcacgcggcgaccagccggccatcttcgccaacggttcgctctgtctgggcgagaatatcgccgatcagggcggtctgcgcgtggcttacacggcactcaagaactcgctgaacggcaccgagcccgaaccgatcgacggcctcacgccggctcagcgcttctacctgagctacgcgaccgtctgggcacagaacatccgcgacgaggagatcgcccgtctgaccaaactcgacgtacactcgctcggtcaatggcgcgtggacgctacgctgcgcaacctccaggatttcttcgatgccttcaacatcaccgacggcaagatgtatatgccggtcgaggagcgcgtgattatctggtaacggcacgctccgttcaataagaaatcccctgccgacgtttcggcaggggattcttttatccacaataaaaaaggctgtcaccgagggtgacagccttttatcagttctttcgttcaggtcttatttcccggaaacctcgatccgttcggtacttttgtacgttcttcccaaaatggtttgccggtatttctccaccttgtcctttccaatggtcatcgtcgaggcaccggtcgcctccttatattggccgtcggtagttgtataggaaacgcccgagccgagtcccacgcggtaggcggcttgttccgcaacctcttccttagccgtcagtaccagttcgacagtcgcctcgaaaggaaccttcgctcctttgacagaaatgctccagggcagcgaagcgacatccgccgtcacggtctttccgacggcatcggtgtacttcgcctgcatatcgaagagctgcggcatatcctctcctccgaaaacttcataatctacatcggcagtcacctccgcaggcggtacggcagggccgtttccgccgttgccattcgtttcgtcgtcgttgcacgatgccagcagaaccgctgaacaaagcagcatccatccgatttttctgtgtaacataagtcaataaatttatcgattaataataaggtgcgaaatgaataccgaagaaccgatagcggaaacccgtcgcccgcatccgcaccgcaaactcgccacgaataccgcgaatgtcggcaaacgatcctccgcccgtcaaattcccggcaaaaataaggacttcggcccgaaatccgatggaaacggttcttttgtttcgaaccggcaacaagcggcaccagtcgattcaacagactccggacagggatcacgaaaaggtcccggccgtcttgcgacaaccgggacccgcgatcaaaaaatctatttatgaaaaaacctttctgtatttacctcctgcaaaaagggtgcccggaaaaataaaatccggccggccccgcagcgtgcccgctaatatttgtagcggatccacttgtaaagctccttgaaggtaggtttcttgccgtacatgaagatacccacgcggtaaatcttcgccgcgagccataccatagccataaacgtagcgtagagcaccgcgagcgacacgacgatctcccaggtcggaataccgcacgggatgcgggccatcatcaccacgggcgaggtgaaaggaatcatcgaacaccagaagaccagcggcgaattggggtccttcatcaccaccatcatcacgaagatactcaggatgatcggcagcatgatcggggtctgcaactgctgtgcgtcctgcacgttatcgacagccgaaccgacggcagcgaacatcgccgaatagagcaggtaaccaccgatcacgtagagcagcagataggcgaaaatctggaagacatatccgaaatcggtcgccgtggcgagcgtctgcaccatctccatatcgacgcccgccgccgtcggatcgagcgtcccggcacgcatcgcctcgacacttcccatcatctcggcagggatcaggtgcggcatgacgagcgcacccacgccgcacaccagcacgccccagatgagcacctgcaccaccgcgacggaagcgatacccaggatcttgcccagcatcagccggaaggggctgatcgaagagacgaccacttcgagcacccggttgttcttctcctcgatgaccgactgcatgaccatcgcgccgtaaatcatcaggaacatgtagaggatcataccgagcaccagccccacgacggtcgatacggccgacgaattggcctgcttgtcgctgccgtcgtcctgcatctggtcgttgcggaagacctgcatatagaccgtagtcttcacctcgtcgagaatctgcgacagattttcgatgttatagtccttgagtttctccttctcgatgatgtcggcgatctgccccgacacactctcctcgaccaacatcgccgaggagccgttggtatagagtttcacgttgccgggattggtcattatgtccccgccgatccagagtatgccgaaacggtcggtatgctctctgcgagcctcgtcgagcgtcaggtcggtcggctcatagaccacctcctcgctgctctcgagccggggagcgatcacaccgctctcgtcgatcacggaaatatgccgggtttccccctgggaatagcgcatgatgagcgccggggccaccatcaggccgatcatcagcaccggcataagaatcgtggtcacgatgaacgacttcttgcgcacccgttcgttaaattcccgggtgatgataattcctatcttcgaatttgccatggctttctacttttgcttgttcgttttcttccgattactccgcgttgagggttcccccgacggcccgtatgaagatgtcgttcatcgacgggatgatctccgtgaaggagcgcagctccaccgcatcgttgatccgggcgatcacctcccgcacgtcggcatcccgctccacatgcagcttgagcgacgaataggccgccccgaactccggctcgggctgttcgagcacctcgcagcgaccttcgagcacgccgcgcagcgcctccgcgtcgccccggtaggctacctggaaaatgttgttgccgtgcctgcgccggatctcgtccacacggcccgtaagaatgttgcgcgacttgttgataagcgtgatatggtcgcagatctcctcgacggacgacatgttgtgggtcgaaaagatgaccgtcgaacccttgtcgcgcaagccgagaatctcctccttcaaaaggttggcgttgatcggatcgaaacccgaaaaaggctcgtcgaagatcagcagctcaggttcgtgcagcaccgtgacgatgaactgtactttctgggccatacccttcgaaagttcgtccaccttgcggtcccaccacgattcgatgccgaatttgacgaaccacttcttgagccgcatcaccgcttcgtgacgcgaaagccccttcaggcgggcgaagaagacggcctgttcgcccactttcatctttttatacagaccgcgctcctcgggcagatagccgatgcgatagacatcctgcggctggatttcgcggccgtcgaagatgactttcccctcgtcgggcgccgtgatgcggttgatgatgcggatcagcgtggtcttgcccgcaccgttgggtccgagcaggccgtaaaccgaccccttgggaatcgtgagcgacacatcgtccagagccgtatgtctggcgaagcgcttggtaacgtgttctactttcaatatctccataatcgatcgaaaacttaaagtgagtccgggcattccgtccgcgatttcctacatctccggctgtaccgcataaggacaatacatcactacgccctgctgtcccaccgcctcacggatcttgcgccactcgccggcccagggtcccagttctccggccacgatgtcggcctttactttggccatgaacccggagaagaacgccccgaagccggtcggagcctcggtcatctcgacgatgcggaacttatcgcccaactcggccttgtcggccgcaatggcgatggccgtcttcagaccgccgttggtatccaccagcccgagagcgagggcatccgtgccgctccaaacccgtccgccggcaatgtcgagcaccttttccagcggcaggttacggccttcggccacgtaggaggtgaaagtttcgtacacctcgtccaccgagcgcatgatcgccgcccgttcggtcgccgtcaggggacgcatcacgcccatatcggccgacgtgttggttctcacggcatcgaacgtaatgcccagcttgttcttcagggcatcctccaggcgcaggaacattccgaacacgccgatcgaccccgtaagggtcgtcttgtccgccacgatggcatcggcaccgcacgaaatatagtaaccgccgctggccgcatagctgcccatcgatacgatcaccggcttcttctcccgaagcagctccatctcgcgccagatcacatccgaagccagcgcgctgccgcccggcgaattgacacgcagcaccacggccttgacatcgtcgttgcgacgtacttcggccaacttcgcagccagcgtattgccgtaaatatcgtcaccgtagcctttgccatcgacgatcgcaccgtcggcatagacgatcgctatctgcgacgaagagatattcttaagatccgcattcaactgcgacacgtattgtcccaatgtcacgaactcgaactgtccgtcgctcttggccacggcgccgtgctcccggaacacatcgtccatctgatcctcgaacagcaatccgtccaccataccatgatcgagcgcctcctgtgccagcgacacttcgagcccgtcggccagtcggttcaaggtcgaaagctcgataccgcgcgactcggcgacggcctccgccatcacattccaataggaatccaccaacaactgcatctgctcgcggttggcattcgacatcttcgaaaggaaataaggctccacggcactcttgtacctgcaggccgtcggacggaaaatctcggcctgaatgtcgagcttgtcgaaaagacccttgtagaacatcagcgtcgaggagacacccatccactgcatccctccatgaggctccaggtagatctcgtcggcgaccgatgccaggtagtatcccccctggccgtaggtttcgttataggcgatgacgaacttgccgctctgccggaaatcctgaagcgcctcgcgcagctcctccagaatggcataagtggccattccgcctccgttcggacgcaggtagataccctggatgcggggatcgatcttggccgtttcgatggcccgcaacgcattgtaaagagtaacctgacgtttggccgtcatcgtggcgaaatcgatgccggcgaaaggatcgctgctcggcgaatcgatcaggtcttccgagaaatccagtttcaaaatcgcgtgctctccgaccgtcaccgcctccgaagaggtcatggaacctacgattccgaacaaaatcatcacggaaagaaagagcatcactgcgctgcccaccacaaaagcgagcagtccggcgaaaaacattttcaaaaatttcataccgatttatttaatattcattcgctgcgaaacggtgcacgaggagcgaacagggcaaaacttttccgcatcgccgaattccgtcccctctccgaatcggagttaatatgcggcaaatataaccgttaattttatgaaaaacaaataatatttatcgtttatcgataacataattttccataaagacttattatatcggaaataatagttatctttgtccagataagccgcatccggacgagcaggagcaggctctttgccgcccggtttgcatgatcgttgctaccaacttaactgaaaatatggaagagagagtcaaggaattactcaaccgtatcctccatccggagacccagcacggtcttgtcgagagcggattcgtcgaacaggtttcgactcccggcgacaagataaccgtcaccctgaatttcgccaaagtgcgcgatcccttcgccctgaagatcaaacggcaggttcaagcgctgctggaagagaattttcccgccctgaaaggatccatcaccgttattattaaggaagccgctcccaagaaaccgcaagctgcggacaaaccgaccatgacgggcgacatagcccacatcgtagcgatcgcttcgggcaagggcggcgtcggaaaatcgaccgtcacggccaatcttgccgtcgccctgcgcaaccggggtttccgggtcggcatcctcgatgccgacatttacggcccttcgcagcccaagatgttcggtctggaaggttacctgcccgaagccgaacaggtggacgggcaggacatcatcctgccggccgaagcgatggatatgaaaatcatgtcgatcggcttcttcgtgaaaccttcggacgccttgctgtggcgcggtgcgatggcggtgaacgccttgcggcaaatgatccaccagacacgctggggagcgctcgatttcctgctcgtggatcttcctcccggcacgggagatattcacctctcgatcatttcggagttgaaaatcgacacggccgtgatcgtttcgaccccccagcaaatcgccgtggccgacgtgcggcgcggcgtggagatgttccgcaatccgcaggtgaacatccccctggccggcatcgtcgaaaacatggcctggttcaccccggaagagttgcccgaaaaccgttactacctcttcggaaagggaggcgcccgccgcttcgccgaggaaaacggcatagacctgttgggagaaatacctatcatacagtccattatggaaggcgctgacacgggaacgccgtcggtgtcgatcgacgcccgcgtcgaaccctattaccgggagatagccgaccggattgttgataaggtggtcaaataaccccacgaacgatgttgataaacccgcaataacttttgaaaagaaaaacccggaaccgtttgcaaaatccatctttcgcccggtatagacaaaacaagaaaacggcaaaaaaaagttttcgcaaagtatgattcgggatatgcacggaaaaagagaggcgaatgtttacaatccggagatgtcgaaatgtcgaaaccggttttgaacatttgtcggtaactttcaaaaaaccaggtttcgacaacctcccggaccttatcggcagaacagaatacggaacttcgaaaagctatgctgtggataacccgaaatacggtataattatcaacactatcaacaggcattatatttatttttaattattcttttaataaaataaaagtataaaaaataaaaaacgatggtcgataactcatcgaaactcaaaacggaaatcgagcggctcaaacgcgagaagaacgccgttatcctggcgcactactatacgctgcccgaagtgcaggaggtagccgatttcctgggcgattcgctggcgctctccatcgaggcgcagaagaccgacgcccggatcatcctcttcgccggcgtgcatttcatggcagagacggccaaggtgctctcgcctgaaaagaaggtgctgcttccgaatctcgaagcgggatgttcgctggcagaatcgtgcgatgcggccgctttcgcggctttcaaggcgaaatatcccggctacaaggtggtttcgtacgtcaatacttcggtcggggtgaaagccttgacggatgtgtgctgcacctcgtccaatgccctgaaggtcgtagagtcgattccggccgaccagccgatcatcttcgctcccgaccggaacctgggttcctatatccaaaagctgactggacgcgagaatatggtgatctgggacggcgcctgccatgtgcacgaggagttttcgttggagaaaatcctggaactgaagcggcagcatcccgcagcgcaggtggtggtgcatcccgaatgcagggcctatatcgtgcaggtggccgatttcgtcggttcgacggcggctattctggactattgcggcaaaagttccgccagggagttcatcgtggtgaccgaagcggggattctgaccgagatgaagcgccgctatccggagaagacgtttatcccggcccctcccgacgacgaggcgtgcggatgcaacaattgtaggtatatgaagatgattacgctggagaatatcttcaccacgctgcgcgacgagcggcccgaaatatcgctcgacgaggaggtacgccgccgtgccgagcgttcgatcctcaacatgatcgccatcaagtaggtttttcgctcgccggagggcgatcctccggtcgcacggcctgtgcggttacggaggcggaacggcggatttccggtcggcggccaaagaggagaaacgagggagaacctgcccggccggttgcggcgaaggacgaaaaaagagaacaggggaaggaacggagagagtgcggcattccgatccggttgggcggatgcggagccggtcgtatgaagtgcgaacagagaaattcaactatatattttttataaaccaagtaaacaaacattttaaggagagatgaaaaaactgattttatgcctggctgcggcagtcgtatcgctgactgccgctgcagacgagggtatgtggcttctgccctatcttcagaagatgaacatcggggatatgaaagccaagggctgccagctcacggccgaagatatctattcggtgaatcacggatcgctcaaggatgcgatcgtcattttcggtaacggttgtacgggcgaggtcgtatcgcccgaaggactcgttttcaccaaccaccattgcggttacggttcgattcaggccctctcttcggtggagcacgactacctgaaggacggtttctgggccatgtccaacgaggaggagctgccggctccggggctgacggtcactttcatccgtcgaatcatcgacgtaacgcccgaggtgctgggcaacatcccctcgatcgccaagggcgaggagcgttcggaaatggaggataagaacatcgaggcgctgtacgagaaattgcgggccgagaatcccggcatgacgatcaacatccagccgttcttcggtggcaaccagtacttcgcgttcgtgatggaggtttatcgagacatccgtctggtcggtactcccccgacgtcgatcggcaagttcggcggcgaaaccgacaactggatgtggccgcgtcatacgggcgacttctcgatcttccgcatctatgccggcaaggacaaccgtccggcggaatattcggaagagaacgtaccctacaaggccgaagagttcctcaaggtgtcgctcgacggttacaaggccgacgatttcacgatgatcatgggcttccccggttcgaccgagcgttacatgacttcgtacgagatcgacgagatgttccaggtttcgggtccgcagcgcatcgacattcgcggcgcccgtcaggacatcctgaaggaggacatggccgccagcgacaaggtgcgtatccagtacgcttcgaaatatgccaattcgtcgaactattggaagaatacgatcggcatgctgcgcggtctgaaaaaactggacgtgaaagccttgaaggaggcgcaggaagccgaattccaggcttgggccgagcagaatacgctgcctgaagagggattcgtcgatgcgctcggcatgatccgcgaggcggtgaacgacaacatggcctacaccggtccgctccagtatttgagcgaggcgatggtccgttcggtcgaaatcatgaccccggctctggtggctaaccggatgctgacggccgaggaggtaagcgacgaagcgaaagcgcaggcgaaggagtattacgccaacttctacaaggattacaacctgccgacggaccgcaaggtagcccggaagatgctttcgatggtcaaggagaacgtgaaggatctgccgaccgttttcgcggaggtgatcgacgcgcagttcggcggcgacatcgacgcttatgtggattacctgtacgacaattcggtcttcacggacgaggccaaggcatcggccgctacgtccgagcagatcaagaacgatccggcggtagtgttggctacgtcggttctgaacaagatgaaggagctgcgcgagaaggccgtacccaacctgcagaaatatgcggacggacatcgtctttacgtagccggtctgatgcgcatgcagcccgacaaggcctggtattcggatgcgaacttcaccattcgtctgacttacggtcaggtgttgccttatgaacctgccgacggcgtggtatatgattactacacgacgctcaagggcgtgatggagaaggaggattcttcgaatcccgaattcgtcgttcccgccaagctcaaggagctttacgaggcgaaggatttcggtccctatgccaactgcaagggcgaacttcccgtagcgttcctggccaactgcgacatcacgggcggtaactcgggttcgccgatgatgaacagccgcggcgagctgatcggtctggctttcgacggtaactgggaggctatgtcgggcgatatcgccttcgagccggatgtacagcgtactatcggcgtggacgttcgctatgtgctcttcgtgatcgacaagttcgcgggtgcggactggctgctcgacgagatgaccctcgtgaagagcgactgcaccaaggcatgcgatcagaaggatgtgaagaaaaaggagacgaaggcttcgaagaaaaacgccaagaaagcggacaagaagcgtaagtaactggaaatacggcgaatgtgcgtttgctttgcaggcgcatgtccgcgaatcgaaaaggggagaacgctcgcagcgttctccccttttcgatgttgaaaaacggtcggatgaaatttacgcattgcggggtatgaaaaccgtccttcttttcggatcggtttgcagaaataaaataaatgactatttttagaatttcattcgtgcggataagtgagatagagatgaagacgaaaaaaggaaaggatatgacctgcgaagaggtcttggagtggcttgcggcccatgccaatccggagttccgggagggaatggtgcggttcggaatcgacgcccggctggcggtcggggtgcgggtggtcgatctgcggcgtctggcgctgaagatcggccggaatcatgcgctggcgctggaactctaccgcaggccggtgcacgaagggcggatcctggcgtcgatgatcgccgatccggcgctgttccgtccggaggagatggatgcctgggtcgccgaatttcggtcgtgggacctgtgcgaccagtgttgtatcaacctgttccgctatacgtcgtacgcttacggcaaggtgcgcgaatacgccgcttcggacgaggagtttacccgacgggcggggttcgctctgctggctacgctcgccgtcggggataaacgggcttcggacgacgatttcagggcctttctgccgctgatcgaacggggtgcggaggattcccgcgtccggatcggaaaagccgtgaattgggccctgcggcagatcggcaaacgcagccgggggctttaccccgatgcgctggcgctggcccgcagactggcggcgaaggagggggcggcagcccgccggatcggacgcgatgcggtgcgtgagctgacgctggagaggatcatcgcccggatcaaatagggtgcagacccccttgcggaaaggctttggaaagaaaaaggctttccgcagcgaaaatcaccgaaacagatgctatctttgggcgaaggataagtcgatccgctatgatgaaagagtctaaattcgtacgcaccaaaatcgtcgtgggttacgtgctgattgccctgatcggcctgacggccatgatctacgtctggcgccagaccggagcgctcctcgaaccggaccacagccagcaggagcttcggcggcggcgcggactggtcaatcagactctctaccatctctatgaggccgaaacatacggtcagatgctggtggccggttatgccagctacgagaatcgttacaaacgcgaactccggctggtacgggagtgcatcgattcgctccgtatgcgtgcggacgacgagtcgcagcagatgcgtctggacacgatcgtgcggctgatcgccggcaaggagcaggggatcaaggctctggaccgcaacctgcgttcggcgggcacggcgacgttgttgagcgaaaatatccagcggatgattcccatgctggactccctgtcgcaaccgactatcgaacccgatacgatcctggtccgcgatacggtgcgcgtggctccgaaaaagaagcgcaatttcttccgccggttcggcgacctgttcagcccgcccaagaacgattcgcaggtggtggtgaagacccgggtgcggatcgacgctccgcctcggcagatgagtctgggggataccatcgccgtagtgctgcaagatctggagcagcgggtgaccagcgagcggctggccctttacgacaaggcgtggcgggaggggttgcggctgcaacgcaacaaccagcagatcaatcagcggatttaccgcctgattatcgacttcgaggaggaggagacggcctatctctgggagcggatgcaggctcgtgaacaggtgcggcgcagctcgctcgtcatactgggctcggtggctgccggatcgctgctggtgatgctgctcttcgtcggaatcctctggcgggacgtgaaccgcagcaaccgttacaaacgccagctcgaagcggctaatcgccacaacgaagccttgctggaggcccgtgagaagctgatgcttaccattacgcacgacatcaaggctccgctgggttcgatcatgggctatatcgatctgcttacgcgtctggacctgggcaagcggggtgcgctttatctggatcatatgaagagctcggccgatcatctgttggagttggtgaccgacctgctggatttctataaactcgactccaacaaagtcgccgtcaatcgcatcgccttctctccggccgatctgtttacggctgtctgcaccgggttcgagccggtggctgcggccaaaggaatcgaattgcggtgtacgctcgccgccgaactttcgggacaggtcgcgggcgatccctcgcgtgtgcggcagatcgccgagaacctgctttccaacgcgatcaagttcaccgaccgggggttcgtcgcgttcgacgcctggttggaagaggggcggctgctgttccgtgtcagcgatacgggtcggggaatcggccccgaggagcgggagcgcatctttcaggagttcgtgcgcctgccgtcggcgggcggcgtgagcggcgtagggctgggcctctcgatcgtcgatcgcctcgtgaagctgctcggcggtacgatcgagctggagagcgaaccgggtgccggaagccgattcctggtcgctgtcccggttggggaggcggaggacgacgcttccgaaaaggaagccgcagcggggatgtgtccgggcagagtgtgtatggagggcggacgacccctccgctgcctgctggtggatgacgaccccctgcaacttgagatgaccgcagctctctgccgggagttgggaatcgaaacggagagctgtccttttcccgaatacgctgaaaaactggtgcaggaatcctctttcgatctggtttttaccgatatacagatgcccggagtggatgggttcgaggtgttgcgacggattcgggccgttcgtgcggagctgccggtggtagccgtttcagcccgttcggacgatgagtcggcctatgtcgaacggggatttgcagccatgctgcggaaacctttcgcgcgggcggaactggtggccgtgttacgccgtgtcgtgccggaggcgggggttgccccggaggagtgtcttccggaagaggatgcggttcgcgggttcgaagctctgacggctttcgcccgcgacgacgccgaagccgcgcgggagatcatccggacctttgtcgccgagaacgaggcccatgccgaaaccttgcgccgggccgcgctcgccggagatgcggtcgctttgcgtgcgatcgctcacaaaatggtgccgatctacacgttgctgggcgaggaggagctcgctgcggcattgcgccgtctggagcgttcggaaggttctgcggacggggctttgcgcagcgcagcgctcggtgtagcggaaagggtcggcgaaattgtccgggcggcaaaaaaagagtatctttgcgaccgttgatccccgccgggggcgtattccgacaggaggccgtccgttcgcatcatgcccggacgggaagttgcagaggatcggacgcttcggtgccggacgatgccggagaaggagcctcgccgaagaggagcgttgcgggaagcctctgcgggcggcttcggtttttttgaatgaaatttcggtatggaaaagatattgatcatagatgacgatgtaaccttttcgctgatgctgcgcacgtggctcggcaagaagggcttcggagtcgatacggctgccgatatcgccgccgggcgccggcttctcgcggaggggagctacgatctggtgctttcggacatgcgtctgcccgacggggacgggaccgatctgttgcagtggatcgccgaacggggcgtgacggtgcccgtgatcgtgatgaccggctatgccgaaatccgcaatgccgtggtgagtatgaagctcggcgcgagggactatgtttccaaacccgttcagccggacgagctgctccgcaagatccgcgaggcgttggatgccccgcaccccgaaacagctgtgcccgcatccgcagcgatggttccggcgcccgcgaaaccgcgtcggaagggggacagggccttgagcgaaggcgaattgaattacatcgaagggcacagcgacgcttcgcgtaaactgtacgaatacgtccgtctggtggctcctaccaatatgtcggtgctgctcgaaggggcgagcggcacgggcaaggagcacgtggcccggttgatccatctgcgcagcaaacgggcgggcaaacccttcgtggcggtcgattgcggcgctctgtcgcgtgaactggcagcttcggagtttttcggccatatcaaaggctccttcacgggagcgctgtccgataagaagggcgctttcgaatcggcgcagggcggtacgcttttcctggacgaggtgggcaacttgagctacgaagttcagatccagttgctgcgagcccttcaggagcgcaggataaaacccgtcggagggctgcgcgaaatcccggtggacgtgcgtctgatctgtgccacgaacgaggatctggaggcggctatcgcgcgcggatcgtttcgtgccgacctctaccaccgcatcgacgaattcgtgctccatatgcccgatctcgcggagcgcagggaggatattatgctctatgccgacttttttctggaccaggtcaaccgcgaactcgacaaacgcgtggtgggtttcgatccggaggctgaaaaactgctcgtggcctgcgattggcccggaaatctgcggcaactgaagaacgccgtgacccgggcggttctgctgacgacgggcgagtacgtcactccggccgagctgcccgccgaattgtcggaggctgttccggcgccgatcgctttgcgcgatccggcgggagaggaagagcggatccggcgggcgctggcggcggccggcggcaacaaatcccaggcggcccggctgctggggatcgatcgcaagacgctctacaacaaactgcatctgtacggcatcgaatagtcgtcgggtgtggaaatattccacatcattttggggatttccacaccgttccacagccgcatataaaattatcaatttcttatatctttgattaccagcataatgatttatgccggcggattggcatacaccttgacgatgtaatgaatacagaggttggggaaccgaaggaaaaaaattattttttagttaaaaaacaatcgcaaaatgaaaaagttattcattgcagcagctgtaatcgtaatggccggaagcatggcttcctgcggtcagaaaacccagaaggccgcccaggatacggccgcgacggaaccggtagcgaccgaacaggtcgagactgtcgagatcgaagccgtaacgccggaatccgagattcctgccgctgcagagagtcagaaaacacaaccggagcaggcaaataataagtagtaatttggagggttattattagttaaacaattgttgcttgccagggggcgtaccgatagcggtgcgcccccgccattttgtaccgggacggaattcgaattttcgggatgggaacgatgcggcaggtttcggtatcagttggggaaatccgacgattatttcgccggaagttgttgagtaaaagtttgtcccggtattggatgatttgcattcgatttatttggatgtcgtggatgttttggttatatttacaatgtcgaagatagtcaccaatggcctgattataaactataaattatttttgctatgtatttagaatcgtagaacaaccaaaaacaatcagaaatatccaagcataaatatttaattatcaatacattctaaaaattaacacttttcggctgctttttgatgtttcccaaatttccacatatttttgagacgtatttctgacgtggagaatttgcggggcttgttttttgtcacaccgtgcagacagttgacaagggtttacaaccgtttacgacaagcgacaatatccgccccaacattcagtgactgaaaataataattcattattttttgttgtttgtcgcattggttgcaacgaccggatgcgataaggacgataattattatcccgctccggaattcgagggagatccgacggctgaatatattgaagcgaatgtcgatttcgatacgcagatttctcaggaaaattccgatccagatactttttacacctatttttgtttgtgcaatgccagtgaccacaaaatttacttcactcttacgttttgcccgacaaaaaacgatgaatttatagaccatatgaatgggcttgtagatcccggaaaaaaatatacaaacagattcgtaacatctaattggtttatggatgtaccgggtcttatcaccaccttttctcctcttattacggagatggaggtctattacgatgtcgatgacaaatatgggcctgttagatttccatcgggaatagaggagaagtattcggattttacgcagcgtttcaagacccggcagatttgtgatccggggcagtggatttacgaagagtttacgccccgccgggcgcgttggacgtatattctgaccaacgaagattatgaacgtgccaaaatgatgtcgggaaaataggactgaaaattcgcggcgatcggttacgactgatttagcctgcattataaaaaagaggactgcattgcgcagccctctttattttatgattcgacttgcatcatgcggcaaggcggattttctgtttccggtttgacccgtttgaatttttaccggatgctttgcgtacggcctttcgggaacagggcgactgggaaataatcaatagaaatgcccgctgggagcgaagatcgcgtagccgaagttgaaagtgaggtacatattgtgccagctcttcaggtcgtatttggtgagcgacaggctgaccggtccgatgggcgtgtgatagacgaacgaggcttcggtgatgtattgcatcttttcgccgggcagcccccggttgtcgcggtacatggcataaaatcccgtgcgcaggaagaaattgggcagcagatcgaaagtgggcatcagaccgccggccaggaagtttttcgcccggtagtcgggcatgaaagccatctgggagtgtacgacgggctgataggccggcagcgacatcaatgtagccgtttcggtctggaaccgggggtgcgtggtccagacggcgtcgatgttgaatccgaacgagaaccatttgcagccgggcaggtcgaaatagcggttccactggaatttggcgccgaaccattcgcggtgggcgttgaaacttcgcttacgcccgaattcggcgggtttgtgtcgttcgcgccccgtgatgtagatgcccgagagggatatttcggacccccggcgcgggtagagaatcttgtcgagcgtgttgcgggcgatctccagcttggtgccgaagaaggagaagcgcgtgaggtcggtgttgggatccgtaccgggaacggcggtgtcgtagcggtaggcttgttgtcctccgttgaaccgcagcgatgccaggctgttgtgtgtcagcggcatggtgagtccgatggagaggaatccctggttgttcttgaccgatttggtgttatcgatcggcgtgaggttgccgaagttgccgtgccgcaggttcaggacttcgaaattgtaggaatagtcgagcgagaagggtttccaaaggtagaagtccgtgcgcccgcccagcgaaccggtcgcataggtcgggccgatgtaaataccggcgaaagcccattgcgacacgcggcggatcgtgtggtagtcgaaaccgatgaatgcctggttgaaagccgtcgaggagatgttgccgccgatcaggaaccggaggttttcgcgtgcggacatcttcagcttgaccgaataccgttcccgcagcgggtcgtaccggaattcggggtattcgaccgaaaattcgtcgttgcctatgacggagaagaagtcgtcgcggaattcggggaaactcatctgccgctgccgtccgtcgtaggtgtcgtccagccgcatgacgtcacgtacataggccgtttgtgcatgggtgagtccttcgaactcgtagtcgtcgaagatgatcgggggacatttttcgcggaaagccgcccgcttggtgcggatctcttcgggcgtgacgatgcggtggattttttcccgcagggccggaatctgggccagtgcgtcgcggtagcccgcttcgatgatcgaatcggcgctgttgaaatcgagcatgctgacattgacagcccggttgatcatcagactgcgtccttcgggcatgtcgtagttggtcttgttcatggccagcgagaaggcttgatcgacgagcgaactgttctccgtgatgtcgttgtttcccgacgtgcatttgctgccgatcaggaaatcgggatggaactccttgtcgaggggttcccaggggaagttgtcgtagatgccgccgtcgtagagtagcatcgtgtcgattttcatgggtttgaacgccagcggaatggacatcgacgaacggatcgcttcgcccatgtcgcccttgcgcagcaccaccggacggcgggtgttcatatcgctcgccacgcagaggaacggcaccatcaggctgtcgaagtcccgccgggaagctgtcgtggccgggccgaacaggtcggcgagggccaggtcgatctgattcgaggagatcaggtacgaaggcaggcggaaacggctcgcgttggggtcgtccgggcggtccttcatgttgaggcggatcgagaggaagatcggggtgccggtattgcggcggtagtagggcaggtagctggggtcgatgcgccccgaaacccactgtttgaccacacccgaagcgacgatccggcgcatctcttcgggggagtatcctgcggcgtacatgcccgcgatgatcgaacccatcgaggttcccgacacgtagtcgatcggaatgccgctctcttcgagtgcctgcaatacgccgatatggtaaagtcctttggctccgccgccgctcatgaccaccccgacgctctgggccgctgccggaagggtgaaaagcattcccgccgcgagaaaagagaggaatttccgcttcatatcctgatatttttattaactttgcctattaaaccgtgcgtaaaagtacaaaataaagcgtaaactttaggttatgaacgataaaatcaacgagctgctcgaacgggtggaggcattcaaacccaaagctgcggccgagatcgaggatttccgaatccggatgctggggaaaaaaggcgagctgacggccctcatggaggagttcaagagcgtggcgcccgagctgaaacgggagttcggccaaaagctcaacaacctcaagaaccggacgcaggagcggatcaacgccctgcgggggcaacttgcggacgccgccggggactcttcgcagcggattcccgacatgagccgtcccggttctgcggaggagctgggttcgcgccatcccatttcgctggtgaccaaccagatcgtcgaggtattctcgcggctgggctatacggtggccgagggtcccgagatcgaggacgactggcatgtcttctcggcgctcaacttcccgcccgagcatccggcccgcgacatgcaggatacgttcttcatcgccaagaaccccgacgtgctgctgcggacccacacctcgtcgattcaggtgcggacgatggagcggcagaagccgccgatccgggtgatctgcccgggccgcgtcttccgcaacgaagcgatttcttaccgcgcacactgcatcttccaccagatcgagggactctatatcgacgagggcgtgtcgttcgccgatctgaaacagtcgatcctctacttcgccaaggaggttttcggcgagaacgccacgatccgcatgcgcccctcgtactttcccttcaccgaaccgtcggccgaggtcgatgtgtcgtgcaacctctgcggcggcaagggctgcaacgtctgcaagggcacgggttggctggagatcatgggctgcggcatggtcgatcccaatgtgctggaggccaacggaatcgattcgaagagatattccgggttcgcgttcggcatgggggtagagcgtatcgccatgctcaaatacggcgtgaaggatctgcggctctatttcgagaacgacgtgcggttcctgcatcagttcgatacggtgctttaagcgctgcggtacacttcccgggtcggggagcggcgaatcgcccgccggatgccgggatgttccggggatgaagtgccgtatcgttcgcgggaatacgaaaagcggttctccgacgttttcccgacagacgaagggaggggctgcgtcttgtccattgcactcttccggcgaagaacgaagatacaaactcaacgatttcaatgaagcggatgcttgcgattctggtgctctgcacggctttctccacggggttcgtcccgcagggagaggcgttgcccgcacctgcggcggaggcctcgtggcccgactcgctgcgaccgaccgaatactataccgagggtgtgaaaaaactcctgatcggagaggacaccctggcggcccgggcactgttcctgcaggccctggagctcgattccgcgtatgctccggcctggttccgcctctcttcggtgactcccgacggcgatccgcagggtacggcgtgggcacggcgtgcttaccggctggactcgctcaacaagtggtacgggcagctttacgggcaaaaactgcttgctgagggagaactcgacaaggcgcgtccgctgttcgtgcggctttcggcgctcgacccgaccaatcccgacaacattcgtattctggcgatcctgtaccagcaggccgggatgccctattcggcgatcgatatgctcgattcggccgagatgcgtttcggtaaaatgcctttgttgggggcgatgaaacgccagttgctgattcgcacggggcagttggaccgtgcgctggccgaagccagggagatggccgaggcgattccctacgaagcggaaaaccacgtgattctggccgacctgtacggtgctgccaaacaggattcgctggccatagccgagtataaccgggcgttggagatcgactccatgaatgtcccggcgctggcttcgctcgccgaattctacaacaagcgcaacgattcgcatgcttatctggccgtgtcgaaaaggcttttcgaaatcgacgagctccccttgtcggaaaaggtccgcattttccggcagctgacgctcgacgtccgtttttaccgggacaacttctttcagctcaacgacttgatttcgacgcttgcgatccgctatcccgacgataaggacgtcgtcgaactgtatgcgcagcacctgatcaatgccggggagctggagcaggcgctgaccctctacaagctgcatctggccgaccagcctccccagttggactattaccgtgcggtgatcgacatcgaaacttaccgcaagcggctcgattcggtttatctgtatatcgaccgggcgctcgaggttttccccggaaataccgagctgtatgcccgcaagggacacgcccaggggtatgccggaaagttgtcgcaatcgatcggcagctataagaaagccctcgaatacgccgatacggactccctgcgcggggccgtgtggggatatatcggcgatgtttatcaccagatggaggaggccggacggaaggactcggaacgggacaaataccgccgccggtgtttcgaggcttacgaccgttcgctacattattactacgataacccgatggtgctcaataactacgcctattttataagcgaatcgtcccgggatccccgtcagctcgaccgggcctttgccatggcagcccgcgcggtggagctggacggcaacaacgccacgctgttggatacctatgcctgggtgctgttccgtcttggacgactgcaggaggctcgtcgaacgatgcagcaggcgatctctttcgaccgcagcgagaatccggaactctacctgcattacggggacatcctggcggctctcggggagaagttcatggccgaaacctactggcgcaaagcgctggagaagggatatgacgatccccgggcgatcgaagagcgtatccggcaactcaaatccaagccctgattatgcgacaagccttgaaccattcgtatcgtttcccgcagcgggcggagtcggtccgcacgctgtgtattcgtttgccgaaggtcgttttgtttcttttccttctacttggtgcagggtcgcttgcggcccagaataccgaccagcagatcgcggcgcagaaacggttgatcgccgacctcgaaaagcagatcgcccgggaggaacaggagatttcgaagctcaagaagggacgtgcctcggccgaggagacggtgcgccgtctggcccgtcagatcgattcgcgcaaccagctgctcgacgtgacggagcgggatgcccgcaagctcgaggtcgaggtggcccgtacggacagcgtggcccgggggctgtcggcatcgctcgacgcccataaacggcgctatgccgagatggtgcgcgaggcataccgcaactacaaacacaacaattatctgacctacctcttctcttcgagcgacttcaatcaggtggcccgccgcatcaccaatctgcgggaggtggcggccatgcgggaacggcagatggagcagatcgtgacgctttcggagcaggtgtccgtcgagcggacccggctgaccgggcagcagcgggcgctggattcggtgaagcgcagcctgaccacgcagcggacccgcctgcagaaagattcgcaggcggcgcgtgccaacatcaagcagctctccaagaaggaaaaagctgccctgcaacagaaaatcgcccgcgagcagcggcttgacgtggcgatcgacgagctgcgcaagctgacccggggcaacaaggagggcaacacctttacggcgaagacttcgaatctgcggctgccggtggtcggcggcggggtgaagcgctacaagggcaatatggccgagatcgcggggccgaagggggcgcaggtgatttcgatctacgaaggcaaggtcgtcgaggtgaagcgcaaccggatcaccaataaatacgacgtctatatagcccacggcgaatacatctcttcgtatgccaacctcaattccgtgacggtgggcaaggacgacaaggtggcccgcaaccagcagatcggaacgatcgggtcgggggtcgatgtgatgaccatgcagcccgagtacaagatggtgttcggtatttacggaccgtcgcccaaagtacagatgcgtgcttcggattgcttcaaaaaataaccgtctatggccgtacgctattataccgatgactgtacctatcgcctgccgcagaaacggctcacggccgcgtggctggaccgcgtagcccgggaagaggggtatgaactgggggatgtgacctatattttttgctcggcggcccgcctgctggatatgaaccggcagttcctcgggcacgactactataccgacgtcatcacgttcgattacagcgaccgcaagggcgcccggatcgtgtcgggcgatattttcatcgatgtggaaaccgttgcggacaatgcacgcgaatacggcgccgcgaagctgaccgaaatgcgccgcgtggtggtgcacggtttgctccatctgtgcggacagaaggataagacaccccgtgcgaacgctcaaatgcaccgtaaggaggatcactacctccgacagtgggatgagctgtccaaagggctgaaatagggctttgcgagggaatccggtcgcggagttgcgggtccctttcccggtagggttatttttaatgcctgaaatatcccgtaaaatcgttcgaatataccataagggtcgattcttcccgacggcggaatgggcggttcaaggtgctgaaaagacggtttgcagagggatccggccgcagggttgcgaactctttcacgaaaggatgtatttttaacgcctgaaatgctccttaaaatcgttcgaatataccataacggtcggttctgttcccgacggcggaatggaccgttaaagacgctgaaacggcggtttatgggcggattcgtcttttgtttggaaccggttcccgaaaaaagatggattttccccggcaatcgtatatttcaatgtccgtcattcgacggtcgttcgttcgcggccggaggccgtgtctgtaatgccgactctctcttaagtcctttcttcggaggggaattcgggtcgttacgtttccaaaaagaacgctgtaatcgcgttttccttcgttgggactgaagcggacgacttcgcttgcgggacgtgtttcggaggtttctggctgcggtggctgcggcagcagttgtgggggctgtcgatcgggtccgccgtgcggcgaatcggtagccgggagaggtggactgcgaagattcggctttcggaggaggcgtttccgccgtgcggggacggatccggccgttggttgtgtccgcaaccctttaatcgtttgtattcttcgggaatgtggcggcagggattgccggttccttgccggagagaagtttatttttgcgggaaaatgctgacaaagttcgggattttcccgcgcgggtcgccggagtgtgccggaagcggggagaatccgtttttgttggggcagcccgtatttgctgatcttttcggcgctgcggcgacgttttgccgcgaggttgccgttttcgatccgactttcgccgtcggacggcggatagctgggcgaaagttcccgttgcgtgcggtttcggctttttcggataagcgactttgttcgtatctttgccgtgcggcggtcggtcgtcggattgacggccggcggtgttttccgcaattcatggaaaaggagatatggttttacattacgatatcatcgtggtcggcggcggtcatgccggctgcgaggcggcttcggcggcagcgcggctcggctcccgcacgctgctcgtgacgatggacatgaccaagttggccgatatgtcttgtaatccggccgtaggtggtgttgctaaaggacagatagtcagagagatagatgctttaggagggcagatgggacggattaccgaccttacggctgtccagttccgcatgctcaaccgctcgaaaggggcggcgatgtggagtccccgggcccagtgcgataagtcgcgtttctcggccgaatggcggcgtacgctggagaatacccccaacctctatctttggcaggacactgcggtcgaactgctcttcgggcagcggcctgcggaggagggtcggccgcaagtgcgcgggattcggacacagatgggggtggagttctcggccgactgtgtgatcctgactgccgggacgtttctggcgggggtgatgtattgcggtcgttcacacgccgagggcggccgtgcgggggattcggcttcgcacggagtgaccgaatcgctcgtggcgatgggtttcgaagccggccggatgaagaccgggacccctgcacgactcgatgcgcggacgatcaatttcgaaattctggaaccgcaatacggggatgaaaatccctcgaaattttccttttccgccgatacgcatccggtgcagaatcagcttccgtgctttttggtctatacttcgaagaaggtgcatgacattctgcggaagggtttcggcgattcgccgcttttcaacggtacgatccgggggatcggtccccgttattgcccgagtatcgaggacaagctcaacacattcgccgataaggaccagcaccagctttttctcgagccggagggtcgttcgaccaacgaatattatctgaacgggttctcctcgtcgttgccctgggacattcagtgggaggcattgcacgccatcgaggggttcgaagatctgcatattttccgtccgggttatgcgatcgagtacgactatttcctgccgacgcaactgcaccattcgctcgaaaccaagctggtggacggactctatttcgccggccagatcaacgggacgaccggctatgaagaggccggggcgcagggggtgatggccggtatcaatgcgcatcgccgcaggatgggggaggaaccgctggtattggcacgcgacgaagcctacatcggggtattgatcgacgacctggtgaccaaaggggtggatgagccttatcgtatgttcacttcgcgtgccgagtatcggattctcttgcggcaggataatgccgacattcgattgactccgatcggatataaaatcgggctgatttcgcaaaaaaggtacgatagtttctgcaaaaaaaatcgactcgtagaatcgctcgtagcattcgctcgcggactgagtgtcaaaccggacgaaattaacgactgtttgaaatcgctcggttgcgacccgatttcgcaaggtcggaaactgcacgacttgttgatgcgtaacaatgtgaccttcgatctgctctcgggtgttttaccgaagctcggcgattttctgcgcgagcaggagatggatgccgaggtcgtcgaggaagccgagatccaaatcaagtacaaggggtatatcgaacgggagaaattcattgccgacaaattgcatcgcctggagaatatccgtatcccggccgatttcgatttccattcgatgaatgccctgacgatcgaagcccggcagaaactcacccgaatccgacctgcgacgatagggcaggcttcccgtattcccggagtttctccggcggatgtgaatgtgttgctggtgaaattcggtcgataaagtcttttattgggattgagcaatacggtttaactgctatgttcccgaatttgacaatcgtttttggatgtatttgtcgtttgtcgatgcggattaagatcggtcgataaattgtgcgattgtatttttctgtcttatattgtcgggagtggcggtggctattcccgattttttacgactgtttgtaagtggtgacaaagaaaacatgcagtaagaaaaagggatgttccacgtggaacatccctttttcttgagttttgcgggcgtcgattacatgacgatcgtgcaccagttgtgtttgtcttcggtgcggccgtactggatgtcctgcaaaagcgtatagagttgcagagaaacctttcctacttcgtcgccgtaggtgtaggtttgcttcgtatccatgtcgtaaatgctgccgatcggcgagatgacagctgccgtaccgcaagcgccgcactcctcgaaagtcgggagttcgtctaccggaatatgacgctcctcgaccttcagacccaggtcttgagccaattgacggaggctcttgttggtgatcgacggaagtacggagttcgacttcggcgtgatatacgtgttgttcttgatgccgaagaagttggctgcgccgcactcttcgatgtatttgtgctcggttgcgtcgaggtacatgatgctcgcatagccgagctcgtgtccgtgctcgcccgacataaggctggctgcatagttaccgcccaccttcacgtcgcctgttccacgtggagcagcacggtcctgttcgcggtcgattgcgaccttcatcggcttgatgccgcctttgaagtaagcgcctacgggcgagccgtaaaccaccagcaaggcatccttggagggttttacgcccagtcctgccgtcgtgccgaacataacgggacgcaggtagaacgatgcgccggtgccgtagggcgggatgaaacgctcgttgcgcttaaccacttctacgcaggctttgacgatcatatcgatcgtcggtacgggcaggcagaggcgttttgccgacgactgcaagcgttttgcattctcttcgacgcggaacagacgtactttgccgtcagcgccccggaaggctttcaagccctcgaaaagagccgtgccgtagtgaaggcaggatgccgacatgtgcatgttgatgtactcgtcgcttgtaatttccatttcgctccacttgccgtccgtgcaagtatagcgggcattgaaatcggtcttcatgtagttgaagccgagagagccccaatcgatgttctccattgttttttaatattaaaggttgtatcttttgttcaagaaatatctttattatccgactgtcgcacccggatttgtctgatcgtcaggttgtaacagccttaatttgcccgaagcgtcctgggccatcagaatcatgccacgagagaggatgcccttcagttcgcgcggttccagattcaccagtacgagtacctgtttcccgacgagttcttcgggtgtgtagtattcggcaatgcccgaaacgatttcgcgcttgtcgatgcccgtatcgacggtcagtttcaacagctttttcgtcttggcgactttttcagcggcgaggatcgtcgaaacacggatatccatcttttgaaaatcgtcgaaagtcgtcgtttccttttgatcttcaacgtgttgtgctgcttcggccgaagcattcgccgctttggtcgccgccaacttgtcgagctggcgttggattacgtcgtcctcgatcttttcgaagagaagcacggcttcgccgatccgatgtccggcagcgagcaggtcggtgctgcccagtttctcccagccgaagggtcctgcctgcaacatcccgacgatcttcttcgccgagaagggcatgaacggttcgatggcgatcgagaggtttgcggtgatctgcaaagcgatgttcaggatcgtcttgacccgttcgggatcggttttgatgagtttccacggttcggtgtcggccaggtatttattgcccagacgtgcgatgttcatcgcctccttcaaggcttcgcggaaccggtagttttcgatgttgttttcgagggcttccttcgcgccggagagttcccgaagcgtttcgcggtcgtagtccgtcagtgcgccgcaggcgggcactgtgccgtcgaagtatttgtgtgtcaggactaaagcccggtttacgaagttgcccagcacggctaccagctcgttgttgttacgggcttggaagtccttccaggtgaagtcgttgtccttggtttcgggggcgttcgcgcagagcacgtagcgcagcacgtcctccttgccggggaagtcggccaggtattcgtgcagccagacggcccagttgcgcgaggtcgagatcttttcgccctcgaggttcagaaattcgttggcagggacgttttcaggcaggatgtagccgccgtgcgccttgagcatggccgggaagacgatgcagtggaagacgatgttgtccttgccgatgaagtgcaccattttggtctcttcgtccttccagtatttctcccagtcgggcgtcaggtccttggtcgccgagatgtagccgatcggcgcgtcgaaccagacgtagagcaccttgccttcggccccttcgaccggtacgggaatgccccagtccaggtcacggctcaccgcacgcggttgcagaccgccgtcgagccagctcttgcattgcccatagacgttggttttccactctttgtgcccttcgaggatccattcgcgcaggaaaccctcgtattggtccaacggcagataccagtgcttggtggcgcgtttcacgggtacggaacccgatacggcgctgtgcgggctgatcagttcgtccggcgaaagggtcgatccgcatttttcgcattggtcgccgtaggcgcggtcgttgccgcagcgggggcaggtgcccacgatatagcggtcggcgaggaacgtctgggtttcctcgtcgtagtattgctccgaggtccgctcgatgaatttgccttcgtcgtagagcttgcggaagaactccgacgctgtcgcggcgtgggtcttcgacgaggtgcgcgagtagatgtcgaacgacatgccgagcccttcgaacgacgatttaatcaactggtgatagcgatcgacgatctgctggggcgtgacgccctctttgcgggccttgatggtgatgggcacgccgtgctcgtcgctgccgcagaccgagatcacgtcgtatcctttcaggcgcaggtagcgcgtgtagatgtccgacgggatatagacgcccgccaggtggccgatgtgtaccgggccgttggcgtagggcagtgccgaggtgacgagataacgcttgaagggtttactcatattgggtagaaaaggtctaacaattactattttgtgtcaaatgtagtgatttttctaataattagaaactaaaacccgactttgttgtatcggattttttcgtttcgggagcgggaaggagtggttcggacggaatgccgccgccggtgtcgtcgggcgggatccgtaaaaaaccggagcctgaaagctccggtttttacggatgttgccggccgtattattgcttgctccgcaggggtttgatgtccttgatgcggagctgtaccgaaaccgagccccggtagtggttctctacgatctgatagcagacgtcgatcggatgtcccgcgcggatccactcgtagtgggtcggctgctggaaggcgatcgtctgaatcgtcgtgttgggtttctggcgctgcatcaggtccatgcgcaggtgctcgcagtcggcgccgacgagcttcgtttcgccgtggctgaccacgccccgcgtgacgaataccggtgcggggttgccggggccgaacggctggaaacggttcaggtcgcggcggaacgccggggtgatgttcgagaagaagagttcgctgtcgatctccacctggggttgcagcgttatcgggtcgatgttctcttcgacgtaggcattgaagcggcgggtgaactcctcgacccgttcgggacgcatcgtgagtcctgctgcgtacatgtgcccgccgaagttctccagcaggtccgaacaggattcgattgcctgatagaggtcgaagccgggcaccgagcgggccgaacccgtgacgaacccgttgctcatcgtgagcaccaccgtcgggcggtagtaggtttcgatcaggcgggaggccacgatgcccacgatgcccttcatccagcgggggttgtagatcaccgtactcttggcggccttcagctccgcgtgggcctcgatgaagtcgtgggcttcctgcgtgacgctgcggtcgatgcacttgcggtcctggttgaagccgtcgatcaccgagccgaactcttcggccaggctttcgttgccttcgatcagcagattgaccgccgcatagccgcccgaaggagcggcgttttcgtcgttttcgtccatccgcatacggcctgcggcgttgatgcggggtccgattttgaagacgatgtcgtcgatggtgatgttgtgtcgatccaggccgcagatcttgatgatcgagagcagccccttcgagggggaggcgttgagccgcagaagcccgtagtgggctaaaatccggttttcatccaccagaggaacgatgtccgaggcgatgctgacggccagcaggtcgagcaacggctcgatttgctggaacggaattccgtttttctggcagtaggcctgcactagcttgaatcccacgccgcaccccgacagttcgtcgaacggataggaacagtcggcgcgtttggggtcgagaacggctacggcgcggggaatttcctcggccgggaggtgatggtcgcagatgatgaaatccacgcccttgcgtttggcatagtccactttctctatggctttgatgccacagtccagggcgatgatcagcgtcgcacccttgcgtgcggcgtggtcgatgcccttggtcgagataccgtaaccttcggtataacgatccgggatgtagaacaacaggtccttgtgacctatctggcgcagaaatttataaaccagcgcgacggcggtcgtgccatcgacgtcgtagtcgccgtacaccatgatcttctcacggttgcggacggcccgctccacccgttcgaccgccttgtccatatccttcatcaggaacgggtcgtgcaggtccgaaagctgggggttgaaaaatttcttagccttctctaacgtgtctatgcctctctgtacgagtagattggccaggactggggagatgcctgtcgcggcagccatcgcggcaaccgccttcggattcccctgaggcttcactacccatcgtttttctatgggcatatttgttattatttatatattttaacattcaaattctcgcataaatcttcgacgaggcgtcgtttgacctcctccatcggaaccgggcgaccgatctccttttcgatcgacgtggcaccccggtccgtaaacccgcaggggttgatatgggtgaaataacgcaaatcggttgccacattgagtgcgaagccgtgcatggtcacgtaacgcgacgcccgcacaccgatcgcgcagatcttacgcgccggctgcgctccttcgatccagacgcccgaggcgccggcgatgcgtccggcccggatgccgtaacgggctaccgtccggatgactgcgccctcgagcgcgtcgatgtagtcgcgcagcgaaagtccgatgcgctccaggtcgaggatcgggtagcccacgatctgtcccggcccgtggaaggtgatgtcgccgccccggtcgatgtggtaaaattcggcgccgatgctgcgcagatactcttcgccgaccagcaggttctccgcatggccgctcttgccgagggtatagaccgccggatgctccaccaggagcaaatagcccgcgccctccgccggggttcccttggcccgcaggagggtgtcgaaaagcctctgctggtactcccagcaggctttgtagtccatttgtccgaggtcccggtattcgacaaacatcgtaaattacgttacgacacctctccgtccggctccgtacggataccgtaaatccggaaagcgtcggttcaacactttctttgtcgcagaccttttcccgcgcggcgggaagactcaggctttcgcggaaacctgtcgcttcagacgcaccgagccgagcgcttcgtccgccaggtacgacgaacgcaccatcggaccgctcgcgcagtagctgaagcccatgtcgagcgcctgctgccggtaccagtcgaatttttcgggagtaatgtacgccgcaacggggtgatgctccagagtgggacgaaggtactggccgagggtaacgatctccacgccggcggcgtgcaggtcgcgcaaggtctgtaaaacttcttcatcgctctcaccgagtccgaccatcaggccgctcttggcgacggcgcccttttcgcttaaatagcgcagcacgtcgaggctcgtacggtaacgggcccgcgaacgtaccaggggggtcagtcgttcggtggtttcgatgttgtgcccgatgatatcgggcccggaggcgatcaccgtgtccagcaggtcgggtttcgcatccagatcgggaataaggagctcaattgtgacgtcgggattttccgcccggatcgcgcggacgcattcggcccagtgggccgcgccgccgtcgggcaggtcatcgcgtgtaacggaggttaccaccacatgccgcaatcccatcaaacggacgctttcggcgagtttggcgggttctgaaggatcgggcggcagaggccggcccgaaagggtggcgcagaatcgacagttgcgcgtacagatttcacccaatatcatgaaggtcgctgtcctgcggctccagcattcggctttgttcgggcatagaccgctgctgcagatcgtgtgcagggagtggtccctgacgatgcgttgcacgtccgcgtattctgcggtgcggtgaagccggattttcagccattccggttttttcaggacgtttaccttctcttcatgcaatttcggcattttaagttcattattttcccaattgatgcaaaaatacaaaaaatatcaatcgcttctcctttctgttgcgaaaaagatgaaaaaagcctttgcaggtgcaggggaggcggtcggttcggtgcgaaggaccagtcggggccggatgtcggaacgggagggaggagtatgcggagagcgcatccggaacggctccggatgcgctctccgcaatatgttctgtcggcgggaaggttatctctgtccgaggtgcagctgccattgccaggccgtgcggagcgtttcttcgagcggccgctcggcacgccagcccaggagggtgttcgccagcgtgggatcggcccagatcgccgtgatgtctccggcgcggcgcggcgcgaagcggtagttgagtttcagtccgttggcccgttcgaatccgcggaccagctccagcaccgaaacgccccggccggtgccgacgttgaagacctcgtaaggggcggcgccgcgctcttcgatcaggcggtgcagggcagctacgtgggcgcgggccagatcgacgatgtcgatgtagtcgcggatgcaggtgccgtcgggcgtcggatagtcgttgccgaagatgctcaggcattcgcggatcccggcggcggtctgcgtcacataggggaccaggttctggggtacgccgcgcggaagctcgccgatcagggccgagggatgcgagccgatcgggttgaagtagcgcagggcgatgccccgcagaccgggatgggcggcgacggcgtcgcgcaggatgtcttcggagatctgtttggtgttgccgtaaggcgacgtggcgggcttgcggggcgtctgttcggtgacgggctgggcgtcgggttcgccatatacggtgcaggaggaggaaaagaggatgttgggccgtccgaaatcgcacatcagctccacgacgttcaggaacgaaagcaggttgttgcggtagtatttgagcggttcggcgaccgactccccgaccgctttcgacgcggcgaagtggatgaccgaacggaattcgtggcgttcgaacagccgtcgcatcgcctgcaggtcgcagcagtcgatctgctcgaagggcacttcggcgctcgtgatgcggcggacgccctccacggcctgaaggtcggagttcgagaggttgtcggcgatcaccacatcgaatccggcctggatcagctcgacggccgtgtgcgatccgatgtatccggcgccgcccgttaccagtactgtttctttcataaggctatgtcgtttgaatttctgaatttttagcattgttcttcctgccttccctgttgccggatggttttccgctgtcggctactgccgtttcgcggcattcgggtcgtttgttccggcttctcgccccttcccggtggtagaggccttgagttgcgattccgaaaaatcgggacggtacgatttcataatcgggcctgtctttcgtctgcggggccttttacagttcctgcatggccaggcagtcggaacggtcgtcgggtgaatccccgtttatttggcggcgtacaccacctttttggtttcgaagaacgcttcgtcgaagaatgcggggatcgggtactccgtccacttcataccggtacggctcaactcgtccgcgaggtcgccgcccttgaggtagaggatgccgttgggcagggcgcccttttgcccccggtcgatcttatcccagacccagccgacgaaggtcggcatctccgtcacggcgcgggaaaccacatagtcgtaccgttcgggaagcgtttcggcccgggcgcagaggggggtgaggttggcgaggccgagtccctccgcaacgccctgcacgaccttgattttcttgccgatcgagtccacggccgtgaaatgcgcctcggggaagaggatcgccagcggaacggacgggaagccgccgccgcaccccacgtcgagcacccgcgctcccggggcgaaggggcagaccttggcgatggcgagcgagtgcagcacgtgccgcaggtaaagttggtcgaaatccttgcgcgagatcacgttgatcttggcgttccagtcggcgtacagtgcgtacagcgcttcgaattgctcgcgctgcgggcgggtcaggtcggggaagtatttgtcgatcagggcaatcataaggtttgtgggcgttgaaatttttttttagggcaggtcggagtggttcgttctgcggcgttcgccggtcggaaacgtcaggatttttcatctgcggcgatcaggcggcacatctgctcccgggcgcggtggatctgggtcttgacggtgcccagcgggagttcgagcttcatggcgatctcttcgtaggagtactcttcgaagaaacgcatgacgatcagttgtcggtagcgcggcggcatggcctggaggtagcgttcgatctgcgtgcgctgctgtttgcggatgatgttctcttcgggcgtggggttgttggagggcggtgccgtgaatttgtcgtcgatgggcaggtcctcctggcgccggcggatgaaatcgacgaaggtgttccgggcgatggtgtaaacccactgtccgaaggtgtaggccgggttgtagcggtggatgttgatatagactttgatgaaggtttcctgcagcaggtcgtcggcgtccagggggttgttggtgcgctgtatgaagagccggtgtatagcctccttgtaacgctcgaaaaggtattcgaaggcgatgttgtcgccctgcaataccaactccacgagcgcccggtcgtcggctatgatatagtcggctatctccatacccgctcgtctttgcgcagcagcaacagccccagtagcagggcgaaaaacggactcagcaggtcgtacaggaagtaacgtccgcagattttctcttcacccaggcggcggctgatgcgcctcgcctcgacgagtacgatcgcaaaacgcgcgagcagcagtacccctgcggcgatcttgaattcccagggcatcaccgccagggcgacgatcgctgccagccagaagaggatgcggctgcccagttcccactggatgaagttcttgacccacaagggataaaaaggaatggctcccccgaagaaacgctgggtgccgatccaccacctgagtcctccccagctcttttcacgcagggtggcgcggggagagaggaccacgctgacattgccgggtgcgatgatccgcgacatgaacaggtcgtcttcgccgatattcatattgaggtggctgaagccgttggcgccgaaatagagccgcttggtgaatccgtagttctgacgcatgccccggtagggtctgccgcagacggcgctcgagatccagtccaccgagtgcatcatccgccaggtgcggatcaggtagttcgcaaaccctttcccgcgctccatgccgcagtagccgagcacgatttcgccgcgtcggaagccgttcgccatgagcgagagccagcggtccgaggtggggtacacgtccggtgtggtgaagagaaggtgctcgtaatgggccgatttgatcccgacgttgagcgccattttgggcgagatcgggaagcggggattcagttcgatcttggtggccgtgatctgtgggaacgactgtttgatgcggaccaggtcgtcgtagaagtcggtgtcccggcctacatagacgatcaccacttcgaagtcggggtactcctgggcgacgatgagcggcaggatctcctccacgaaggcgtaatcttccgagaagaggggaatcaccaccgataccggaggggtttcggagaggatctccggacgccgggtgtccttgtatttgggtatgcgcccgtaaacgaacaggtagtaatataactggatcccgaacatgaccagaaggacgcccgcgagggccgtgccttcccagccgtaatgagtgatgatgcgattgaaaaattccatggcgtatgcgttatggcgcgtccgggacagtgaaggtcggacgcggagccgaattcgttcgaatcgtgccgaaatgcggccggtcgatacggaaaacggattccacgcaaagataaggattttatccgaatcggtgtcctgccgccggaaaattcgcggcggtggcccgaagcgaaccacgccgtccccgaggtgcgggagaggacggtttgcagaggcggaagcatgcctttgcgggtcgggtcggatgaggttacgccgttaccgaaacggctgtttcccgtacggcggcttcggcttgcggtgtcggctgcaactcttcgggtccgcgatgccggttgcggtaggtcgcgggtgtcatgccgtattgtttgcggaagagtttgatgaagtgcgaggtgttgggaaaggcgcatgcggtgccgatttcggcgatcgccttgtcggtcgagatcagaagcaaccgggcatggatcaggcgttgccggatgagccattggtggggcgaggtcccgtagatgcggaaaaattcctttttgaacgaagtcagggagcggttgcagcgttttgcgatctcctcgaccgaaatatcggaaaagatgttggaatagacgatttgctggaggttgtcccgggccgcatcgacgttgcccagcagcttgcttttgatgcaacaatccccgtgcgaaacgatcaggtagagcagttcggtcattttgaggttttcggcggtcgggtcatccaggagcgatccttccgtgaggcaatcgtcgatgtggctgaaaaaacgccggatcgaactccagcccggcatcgtggcgtggttcagggtacggcagtcgtcgcactggtggttgttggtgatattcagcttgtaggcgatgttgaggtgcagcaggatgcgttgcagctcttccgaggtatagcgaacgaggatctgttcgtagggatgtccctgcgcggggatgtttttggtatagtggcaacccataccgaggaagaaaagatctccctgggagaacttgtagcatttatcgtcgtaatagacgtatttttctccgtggaggatatatccgatcacgcagcgggtaaacttatgggtttcgataccgttgttggaggccgatacatacttttcgatcgacggattaacggtttgggtgtcgtaggattcgttcataatcggaagattttatggctcgatgaaggccggtgtccatagccttttatcgaagattatgaatcaaatatacaatctaaggttgtatattccaaattaaaaataggaaaaaattagatcgaaaatgttaaaatatatactatttcaacattttacgcgttttttattgcaatatatttacaatgcaagtgatgtacaaaatgagatacagcagagttccgacggtacgttggatgcggatgaaggtcaggggcatgagcagtgctgcgggtacggctgcgacggccagcagtcccggcgtgacgctcggtaccgctatcaggcagcccgtcaccgtaaagagcaggatggtgtaggtcagcatgccccgggctttgatgcttaccgtgcggaaactgatgagtccgaagaaaatagcgcagagtacgatgaaaaggacgattccgagaagtgcggggacgagcggaggcgtattggcgaaaatccggtatccgctgtcgctgatgaaggagtgccataatccggcgggggtatccaggggattggctccctgcccccaggcgatgtagcagacagccagaaaagggagtacgacgctgcacagcgatacgaagacttcgcgcaaggtccgtcggaaacagaatgctgcggccaggaccaacagcggcaggggaagcagcggggcatagagcagtggcagcagccccaggaaaaacgaagcccggaacacggctccgatcgcgtagccgttgcggaagcaggcgaagaagttctgggtcgataacagcaggacgaacgctgcgacggattccgtcagatactcctgccccaggaggattccgcaggcgaccagtccgtacagggggatggtcagcgtactgctgacggggtagagtccgtagcggaccgccagcctcccgcagagaatgcccgtcagtaggagcaggccgccgcaaaggatgcgggagcagcgggggaatcgttcctggaacaagccgatcaggtcacccagcggggtggaaatcatcgtttccggagccggtgaaatagttgtcccggtcgtcatggcggctgcgatgacgaccagtatggacgcgatggccagcagtaagggttggcggataatgtccggtttcatggttcgacgatggttttgtccgaatgcgggctgcggtttctgttcccggcaaggtgccgaaaattcagcattgcgttcgcttgtcggaaacggccgctacaaaggcaattatatctttcgatgcacactcttatccgacgattgcagcgccgaatccgaggggcgcttattcgtggtccgaagccgcgcctgtaaggctgccctcccctaaatttcctcctcggagggaactcggggcgcaacactcccccaaaggtacattggagtatataatcccggctacaaaattaggaaaaaagcggacgaaaccgtaattattttggaaccatatacgattttattccggatctgtttttggtcccgggactttgcctcgaacggccgttgtctgccgccttgggcggtagttacggttccgtactgaagcctgcctcctgcttttcggaggaatttcggggaggctccggcaaatccggggtgatcgaaacgtcggtgtaaaattggatatgattgccgatatttttaattttgcgaaaatgcgtgcggtatttcggggaggtccgaagcgtttcggcgcacaccccgggttcccttgtttttgcggagatcggcgctggcttgtcggttttcgaagggggcatcgaaatcgtgcgataataactttgtttcggatgttggagaattgctaccagaaagagctgcccgaagccgggtgcgacgaggcggggcgcgggtgcctcgcggggcctgtttttgccgctgcggtgatgctgcctccggacttcagccacccgttgctgaacgattcgaagcagatgaccgcgcgtcagcgcgatttgctgcgtgcgatcgtcgagcgcgaggcccttgcctgggtcgtaaaggccgtttctgccgagcggatcgatcagatcaacatcctgaacgcttcgttcgaaggaatgtcgctggcggtcgcggaattgccgatccgtccgggatttctggcgatcgacggcaaccggttccgcacgacgctcgacattccgtatcgctgcatcgtcaagggagacggcaaatatgcggatattgccgccgcgtcggtgctggccaagacccaccgcgacgaatatatggagcgcctcgccggggattttcccgaatacggttgggagcgcaacaaaggttatccgacccgcgaacatcgcctggcgatccgccgttacgggcttacgccccaccaccggctgacgttcaatgccgggatcgaccagttggagctgttctgacgccgcttgtgaggaattctgccatacctcccctccggggctgaaataaaggcaatcatatctttcgatgtacattcttatccgacgattgcagcgccgaatccgggggcgcttgttcgcggacctgcgccgcatctgtaattcggctcctcctttaggaaggaactcggggcgctgcgctcctaaagaggtctgatgaagcagtaaacgcaaaaataaaaaacgcccgacgatcgggcgtttttctatcggatgcaggccgtcgccagcggacggccgtcgttattttaccggtatttgttgctgatcagcgtcatgaactcctggcgcgtaggcgggtgcgagaggaatactccggtgaatgccgaggtagtcgtggccgaaccctgcttttcgacgccccgcatctgcatacacatatggctggcttcgatcacgacggcgacgcccatcgggttgagggcttcctggatgcagtcgcggatctgcaccgtcaggcgttcctgcacctgcaggcggcgggcgaagctctccaccacgcgggcgattttcgaaaggcccgtgatgtatccgttggggatgtacgccacgtgcgctttgccgtagaagggcagcatgtggtgctcgcagagcgagtataattcgatgtccttcaccagtaccatctgccggtactcctccttgaaggtcgccgagcggatgatcgccaacggatcgtcctcgtaaccctgcgtgaggaacgacatggccttggccacccgttcgggggttttgagcagaccctcgcgtgccgggtcttcgcccagcagttcgagaatcgccttatagtgttcgcggagttttgcgatcttctcgggcgagaagttctcctccttttggtatcgtttcatttccataagcggggcaaaggtagcttatttcccccggttatgcaaaaattccgctaatttacgcacggcgcggccccggtgcgagagagcgtttttctctgccgggtccatttctgcgtaggtcttggcactccattcgggaatgaagagcgggtcgtagccgaagccttcggagcccgaagcgcactgggcgatgtgcccctcgacgatcccttcgaagaggtgctcctcgccgtcgaggatcagcgagatgaccgtgcggaagcgggcccggcggttgccgacgccctccaggttgcggagcaggagttcgttgttggcggcgaagtcgtgcccgtcggtggcgtagcgggccgagtgcacacccggtgcaccgcctaatgcttcgacttcgagtcccgtgtcgtcggcgaagcagtcgcagcccgtgcggtcatgaacgtagcgggctttctgcgaagcgtttcccgcgatggtgtcctgttgttcgggaatctcctcggtgatgccgaccgaacggggtgtgacgagttcgaaatccgggccgagaacggcttgcacttcactcaatttgtgggcgttattggttgcaaagatgattttcatagacgtatcgtattgttcggtttcgtcgaatttccggatcatttcggattgcttgcgtgtgctgtgtgtttttgcggaacccgggtgatggctttccgtcgaatcgcaacggattcctttgtgctacgtgcggggagtttcgagcagctccagccggtgatccgcctcgatcttgtcgatgatcgtcttgacgagcgtatccatttcggaaccttcggagtagtcggccgggcagacgtggcttacgcgattgtcgcggatcaggccgttcagttcgcgccgggcgtttcggatctcggggttatagacggcgatcgaatgtccgccggagttcttcaccagccgcatgcaggggatgtcggtcgtaccgtcgcccacgtagatcatgcgccggaagggtaccgggcgcttgtcctcctcgatgtactggttcacgagcttgctgtcgaagaccgattcgacgcccttgttgatcttgaagatgaactgggtcttgttggtgtaattgaccgctacggcgggccaataggcgactccgtcgatgtcgtacaggaacgagcaggcgtagatccgccggaattcatgggcgatttccgtcccttcgatgatctccttcagacccgaggagttgatgtagtgcagtatccggatgccccgcgctgcgccataggcgttgatgcgtgcgaaccactcccggactcctttgtagagggtcacgcggcgacccgactcctggaacgcttcgcgtcgcagggacaggcctttcgaccgcgcctcctggatcatgcgggccatgtaggtcagcaccatgtcggcgtcctgctcctcggccagttggttggcgtcgtgccagaactccttgttgctcttgccgacggcggggatgaagtcgtattcctgcatgtttccgggggcgagcgtgccgtcgaaatcgtagatcagggcgatggtcagcggttctttcataattgcgattgcggttgaatgtgtcgttgtcggttccggttcggcggagagggtgaatccgccccgtcttcgtcgccgggcaccgtcgggctgttttttcgttttttccgacgctccgggcagccgtttcgcttccgtttgtcggaaacacgggattttccggtcgttttccgtgttcggcgtggcttcgaaatccgggaacccgcctgccggtgaaaatgtcggttgaaaatccaaagttaagaaaaaatccctatttttgttttcgtaaggaattaaatcgtaccgaataccttagatttgcgcagtaaacaggagatgagatagagttggtaattttgtagagaagaggttagctaaaagaaagggaggcagggagtgaaccaggtatcgataagaattcaagattcatttccatattaggactctttgtctttcttgaaccgagacctgaataagaatttaacctttcattgttaaggtagttaggataggttcaagttcctttctctcaatttgatggtcaaaaacaaaagtaatggacaatttttatttcatcggggttgacgtcagcaaaaagaaactggacttctgcgtactattcgagggtaaggttctgcgcgaagaacaggtaagcaaccaccagcaggctgtcgccagactgatcggcgagttgaagaacgatttggaaatggataacgaacagtttttaatctgtgccgaacatacggggcaatatactttccctctggtatgtgcttgcaagtcggtcgagtgcaaactttggttggagaacccgtcccagatcaaatattcatccggtatgcagcggggcaagaacgacaaggtggatgcaaagcgcatagccatttacgcttcacggttcggagataaggttaagtattacgaccgtcccaccgaggagatagagaggcttaaacagttggagagggagcgtgcgctttacgttaccgacctggctaaatacaaaggccagatgtacgatcagaaagattttatgccggcggcgctttatcgcaagaaaacaaagcggatgaaaggcttaatacaggaactacaagcggctatcgatgcgatcactgctgaaatggagaagatcataggctcaacggaagtgcttgcgcgccagatggaacttttaatgtcgatagacggtgtaggtaaagtggtagctctgaatgtgattatcgaaacagaagcgttctcccgcttcgacaatcccagaaagttctgctgtcacgcaggtgtcgctccgttctcatacacatccgggagcagccagcactccaaaaacaaggtctcgcatagggccaacaagaacataaagaaactgctacatatggcagccgtatcggtaactcatcgtaaagagggtgaactaaaggcctactatatgcggaaagtagaagaaggaaagaacaaaatgtcggtaatcaatgcgttacgtgctaaaatcgtggcccgtatgttcgccgtcatcaaaagaaatgaagtttatactcctatttactcttaaaaaacttgcaaaaaccataagaatatggaatttaaggaaatactccggcgccggcgcagcgtccgcaaatatctttcccgcccggtggagcgggaggtgctcgataccgttcttcgggaggctctcgcggccccgtcgtcgcgcaattcgcattcgacgcacctgcgcgtgctcaccgatcccgaaacgatcgcccgcatcgcccggatgcgggattacggttcggcatttctggagcatgcccctgcggtcgtactggtcgagggcgatcgtacggcgaccgacctttggcgtgagaacgcggcgatcacggcgacggccctgttgttcgcggccaccgatgcggggctggcctcctgttgggtgcatgtgaacggacgtccctgcctgaaggatcagcccgacggagcgcaggcggaagattatctgcgggagttccttcccgtcccggcggagcacggcatcctgtgcgccgtcgccctgggttactccgacttcgagcctgcggccctgcccccgttcgatgcgggaacgcatatccactggccggaaaagtagcggggtcgaatcgagtccggggcgggcgagtgtcgggaaggacctcgttcggtcgttttatgtcgcttgccggtgcttgtatcgggaacccggcgggattcgactttcttgggctgaatttatctttttcgcggcgaaaatccggttcgtcgaataaaaaaaccgcaacggaggggttgcggtttttctgtttcggtacgccttgtcatttcttgttgaagagattcatcgtccgttcggggccgatcgcggcgaacgagagaatcgcgtcgccgaagtatttgagtcgttcgggcatcgccttgcgctcttcgtcgttccagtgccccagtacgtagtccacctggtgtccgcgcgggaagtcgccgccgatgccgaagcggatgcggctgtactcctccgtgccgagcagttcggtgatgttcttcagtccgttatgcccgccggcgctccccttcgtgcgcatccggaaggttccgaacggcagggcgatgtcatcgacgacgaccagcagattctcacgaggaatcttctccgcgtcgagccagtagcggacggccttgcccgaaaggttcatgtaggtcgagggcttgagcagcaccagcgtatgccctttgctgcgaagcgtggccacggcgccgtagcggtcggtggtaaaagaggtgttggatgcttcggctaaagcatccaacacgtcgaatccaatgttgtgccgggtatcggcatattcggcgccgatgtttcccagaccaacgatcaggtatttcataagggtaatccgttgagattacttcgcagccgcagcgtcggcaccgcgcgaagcacgggttacgcgcacggcgcatacggccgtcgttgccggggtgaggaatttcactccgtcgaagttcaggtcgcccacgaagatcgtcttgcctacgcccagcggagttacgtcgataaccagttcgtcgggcagcttgtcgagctgtgcgctcacggtcagcttgcgggccgagagaacgagcttaccgccgatcttcacgccttccgcattaccggtcagacgtacggggatcgaaatggctacgggtttgcccggctgtacgcgataaaagtccatgtggagaatctcctcgcggatggggtggaactgcacgtcgcggagtacggctttttcggttttgccgtcgatctccagatctacgatgtaggagttgggcgtgtagatcaggggtttgatctcccggggatccaccgagaacgaaaccgtttcgccgccgccgtagagaacggccggaatctgaccttcgcggcgtaccgcctttgctgctttcttgccgtagttttcacgcttgacggcctttacttggattgttttcattgtaatttgttttttgtatgtgttaccttgggcgctactcagtccgcctctcgacgggcggaccccctaaacgcttgcggggccaaagataagcatttattcccggaaaacaaaaaacggcaccctgctttgcggggattccggattctgcgggcgtcgccgtccgtggcggcggagaacggcgggccgctgccggagtcgggttcgctatggcttcaggacgaggccgcccgcgatcagcacccggtgcaggacgttcttttcgggagcgtattccgggtaatcggacgggtgtgcgtcgaggtgatccgagagggcgtgcaacagcgccgagagccggttccgcaaggcccggtgcgatgcggcgagctgctgttgtccggccggctggcaggcggaggatttggtgacggtcgtgccgcccgctccgccgtgcagatcgagcgcgggttgcatggcgacgcgcacggcgcaggcggcagccggcgctgcgaactcttcgcgcagggtcgggtactctccttcggcgagtttctgccagagtgccgggccggtcacggggaggagatagcgggcttccgccgccgcgatatcgacggtgccgatcgcttcgggcggcaggtagccgccgtcggcgaaagcgaggtcgatgacctcgcgcggggttacgagggtggtcatggtcagtcgatgcttcggaggttatacttggtgatttcggccaggaaatgttgctggcgttcgtcttcggggtcgtagtccaggccgtcggctttgcgggcctcccagactttcatataaaggggtttggagcgggtcggcggacgattgacgatttcgagcgacgaggggtcggcgccgaggatgcgtccgatgatttcgcggatcggctccagcagctcggcctgttcgcccaggatgaccgtgttgagggcgatttcgtattcgtgcaggatgcgttcggcgctgaagcccgaggcgtagtccagtccgctcagggtccggaaccacgaatgggcgaccacgatgtccgaagtggcctgttcgtgcagcgaccgccagtcgccttcgttctgcgaggcgatggggatgaagcgcgagtggtcctctgcagccccttcgcgcagtacgaacatcacctgcccggggttgccggcgaatttctcctcggccgtgcgcatgatccgttcggcctgcgcctcgtcgtccatcgtgctgtcgagcatcatcacgcccgagagttggaacgagttgtcgagccgcgagatattccagcggtcggtcttgtaggcgatggccgacacgccgaacccggcgatgtagggcggtacgccgtagtgctcgaacatcggttcgtagtccttgtagtggacgatcgcgcggagcgtgccgtcgtcctgccgttcgaaaagcgggtagaggggcagcgtgcgggcgtccgcagccgagaaacgggaccagtcgtggtggagcaggatgtgccgtgagtctttggctacgtggcagcgcgaggcgtcctgatggtagagggccaggaacgagtgcttttcgtcggtgacgacttccaggaaggcgttgtcgaagagcgacttgtcgaaggacagcttgctgcatacctgccgcagggattcgcccgatccattgacttgcgcgacgaaggcgcccagcagggggacttccggatcgaacgtgaagcctttgccggagatgtagtcggccttgtcgttgatgatgcggcggtgcgtggtcgagcggcgcgacataagggccagggctgtggggaagaggttgtcgtcgccccagcgccagaatttgtcgctttcgacccgtgcggcgccgagcgtgaggtaggggtcgtcgcggcggacggccttcaccagcgccgttttcttgagtttctgtttcgtgttcatgggtattggtttgaaaaacagaggctgccggacgggttgccggacagcctctgtcggttattgttcccggatgggcggtgccggggccgtatcctcgccggccagcgtcaggacgaggacgggacgtgcggtgaatttcgtttgggattcgtaccggatctccgtgagccgcaggggttgctcggctccgaatttttccgaccttcccgccagcaggaagacgcccgatgcggtttcgatgcgggcgaccgtgccttcggtcgcgagccgtgcgagctgtcgttcgccgaggcggtcccggatttcttcgggatcggcgaccagcgtgagcgtatggcggaagcgcggaggtccgtccggattcaggttctcttcccggaacgacgaggactgttccaggatcagccattgatcggccgatgcccccgctcgcagcgtcagccctgtgcagcagccgtcgccgtaggtggccgatacgatgtcggaggccgggatcagccagacggcttcgatgcctcccgcaggctttaggggccgggcgtagggagtggttccggacatggtcagatgcgcgatgcgaatgcgaccagtccttcgtcgagcacgtcgcagccggccatgaagacggcgcgctggcggttctccatttcgtcggggttgtaccacatgcggatttcgttgccggggaagtcggccgtattgacggccagcaccaggttgcggcggtcggtcaggatgcagaacgacttgggtacgggcgacgaagaactcagtttggccaggtaggacgagatgcgcagatccacgacgggaatgccgtgatacagcaggttttgacggccgttgatatagtcggtgtaggcgccgtccgtgctcatgctgtcgaggtgcttctcgtaggcgctgtaaacgtccgacgaaacgaagaaggccagttgcccctcggctttgaggtctttcaggcgttcgtccgcatttttccagagatcgtcgaacatggcgaccgagttggccggtgtgttcatggcgtccgtttcgtaattgtaggtatagaccttgttgttgttcgagtaggtggcgatggttttgagaaatccgtcgaaggtgttcgcgccgctttcggccgacgtgtcgcccacccacatcgtcgagcggatgctttcggcgatggcctgtttgaagagcgtggtttcggcctcttcgagttcggtgcccgtgagatcctccatattgacctcgggacggttggtaatcagctcatagaccagcgagaagtagtctgcggccgagtagcccagttcggctttcacgcggttgagagggatggttttctggagttttttcgagccggcgccgccgctccagcctgccgcggtgaatttttgcaggatgtcggttttgggctcccacatctgcactgtcgtcggtacgggcatgttgtaaaggacgcggacgcccaggtcgatggccgaaggaccgctcagcatcgggcggaaaaagatcgtttcgaggtttttgccggtgtaggttttggcattttcgagtgcgctcatgagataatttgatttttggtgattgaatgggttgttcgaacgaatggaatcggttcgggtgtagcggttttgcggagggtatccgaaggcggggcgccggatcctcggcgggcgggttttaccggatcagttgcttcgcatcttcggcataggctcgctggttggccgagggagtcgtttctccgatcgacggatcttcgcgggggagcgtgcgggtcggagccgcgaattgctggccttcgtgcagggcgagttccgaagtgcggaggccggaccctttttccgggtcgccgaaatggaggatgttgcggtcggggggaagggcgtctgccggacggacgagtcccagcttgccgagcagcttgcgccattgtccggccggcgtcgcctgtgccgcaggcgttttttccgtagcggcgggttcgatgatccgatcgacgagtccggcggcgagtgcctcctgcggagagagccagcggccggagccgttgttttcggccatcaggagggtgaactcctccggagtgcggcccgaacgggcggcatagacctccgccaggcgtgcgtcggttttgcggagcaggtcgatgcgggtcgcaagttcctcggcattgccttcggcggtgcagatcgaattgtggatcaggtagagggcgtgggccgatatttcgcggcatccctccgatgcggcctgtgcgatgactgtggcagccgaagccgtatagccgtagcagcgggtgacgatgtgtccgtcgagcgacgagagggcctcgtagatcagcagggcgtcgtttacgtcgccgcccgtcgagcggatattgacgacgatttccggagcgtcgatttcgcgcagccggtcgaggctgtcccggaatttttcgtaggtggctacgcgcgacgagggttggtcgaactgccactcctcggggacgccgatcaccccttcgatgtccacgaagcaggtgtcgttgcggttggtgatttgaatgtcggattgcatggaaagttgtttttttgccgactcgctcgccggcgttcggaatggggttggctgtgagtgggggtgttgcggtttcgcggcgtccctgctccagcaggagggttgggcggattttcgaggagcgcatcccgtgagagagcggggagtcgtacggctgcggtccgcgcggatgaaggacggtcgaagggctatccgttgggcagacgggtgaaggtgcagcgggtcgaggcggccgaggggtcgtaaccctcgatgcggcggagcgtgcagcggacctcttcgccgccgatgcggaacaggaacgtcgaggcgatgcagggggcgaggcgctgtatctggaagagccgttcgatgtcgcacggttcgagccgcaggtggagcgtgaggtgctggcagcgtttctcctgttcggcttgggtgtcgtagaagcggtgcagtccctgttgtccgtcccggtcttcgaaacagagcgtgaatccgttgtcgggatcgttgcggtggaatgcggccagggggtagctgtctccggtggaaggatagccccagcgctcgccggcgggcagtggctgcatgccgcagtagcggacgatgcggggcgtgaaactgctccggtcggcggtgtccggggcgtcgcggtcgccgacccgcaggacgagggccgaaggtgcatccgcataacattccgtttcgctgaccgtcggcgagaagaaggggttggcgaggtttctttcccggtcgatcgccgccgccgagtcattgaccagacgccactggccgaagggctcttccagggtcgcgttcagccgggtcaccgcaccgtccgcctcccggtacttgtagatgcggacacgttccgcatcctgtgccgcatcgcccagcaggatcggctgcgagcggtcgatccgggagctccagtcgaaggtctggccgaggcggtagaagtcgtcggccggttcgacgtaaaccgtgcgggtttcctcgtcggtgtaaaagcgcagattgaacaggtgccgcagggcgtcgagtacgacccatttgcggacgcggtgccgggcgacgtcctcgaaagagatcggggtgttcagaccgggtgcgccggtgaagtcggggcgcagggtgcattggcggctcagggagaatttcatccccggttccgcaccgtagaaatagatggtcgagaaggttttgggcgaggtcggcgtgacagttaccgggttggtacggacggtcatttccacttcggtctgtccggtttctccgatgtagccgtcgtagagtgcccaatctccggtgtaggtcgtgtaggtcgtgcttccggcggctttgcagagcagtaccggggccgtgacggtcgagccggaaggggtcgtgaccagagccgaccgcgaatcgaactctccgattgcgtgcccggccgtgccgttgacggtgcaggtgaggcggtaggagtttccttcggtgtggttgaacacgatggcacggtactggaaggcgggtttggtcgagtttctgcggtcggcgtagcggtttgcgagggcgccctgtacctcggtgccgtcgcccaggtagaaggagtcgattcctttgaggcggttgcggtcgaggatgcggtggtcggtgatgtagcggatgtggtattcgaaggctaccgtcaccgaggtcatgggcctgaagacgatctccccgtcttcgacggtgaagcagtggttgttcgaaaagacatcggtgagggtttctcccagatcgttttggtcgttcggattgaccgtttcgacgaaattgcctactgagttgatcgacttgtaggggttggcgtacacacggccgtcgctgttcgccgtcgtcgccgccgtcgtcgtacgccgggccaggaaatccatgtggttccgcagggcgttcgtgtcgcgcgaggaataggcgccgctcaggtagagcgagcggaaaaattcgccgttcagaaaatcgctttcaagggtgtagcccgcttcggaaaagagtgtctgcacgacggttgcagccgaaatgaacgggtggtagtcgtccacggagaggaatcgttctacgggaatcagttcgaccgacgacagttcgggggtgtattcgtcgcggcataccgggaagaatttgaccggggtgttgttggtccaggtctggcggatcatcgtgggcgtgagccgtcccgagaaggagatgccgagggtgttgaacatctccgcagcggcttgccgggcccattcggaggtgccgctgcggatctctatcagatacccctccgggtcggagtcgtacgctgccgagagcagccggacggagccttgcagcagtttggcctctccgtcgctcaaaacggccgtgtgctgcgcggcattgaagcgctggcccgtgtaaggctcggcggcgaatccgaaaatgcggtcgttggtccgggttgccggcagccgcagtcggagggcgtgccctttgtttccgcttcgcacgtcggcgagatcctgggcatcgtagtcgagggcgatgcgctgcgacgggtcgaggtcgcagggaatttggtcgatagtgagtttcataggcagcgggtttcttgtcggggacgcaggctgatttcgatacagcccagggagccgtgccggccgatcgtctgctcccgggtcaggatgtccacctcttcgtatttgtcgccgtcgatcttccagacttggggcgatgcggcgatttcggccagcgcttcgataacggcggcgggttcgaaggccgaggcgagggtcgtcgtccgttcgtcgcggatactgatatcttcgtagcccgcgtcgtcggtgagtacctgttccttgcggattttctggacgacgcttttcaccaccggaaaagtgtagtgttcgatcgaacctgcacggcttcgccaggcgatacggcatccttcgtcgcatttcggaacgaccgtgtagccgatttccgctacggtctgtccggcggtggcgatccggacggtgatcgtgccgaccgagggcagaaaacttcgggtgttgagccggaagagggtcagctcctcccctccgatcgcattgtacgtaagagcttctgccgtaatgtcgctcgtgaccgttacggtgtgctggcccgggatgcagcaggtgatttcgtcgctttcgccataggcgatgatgcggtgcgaaggcatcgtcgtcagaatccgggacggtttcacggagtcgtgtgccgcgacgaaggtccggacttcggagtaggtcgttccgacggccagttgcaccgaagcgctccggctttccgaattgcagaatccggtcatgccggacgaggggacgaagcgaatgtttttccggaccatcggggcgatgttcagggtgccggtcggggtgttgtaaaaccgtttggagccgatcctggagccgtccctggtgctgagtatttccagaaacagttccgtttccgccgcgttggagaacgtgtaggcgagcgggccgaatacggaggaaaacatctccggcagagaggtgaatgtcatgtgaaaacgggtttggaagtggatgattgtgtgcggtccgagataccgtgcggtcgccggtgtcggggctgtgggcggagtcgtgcccttcgctttttttcgaaagatgcggaggcggcatcggaaaggccgatggctgctgtgcggggtgtccgggtgcctaaaaacaggtgatgacgtcggctttggccgtttgggagatttctccgtgcggggtgtaggctcccgatccgggttggacggtgaggttttcgacggctatgaccttcgggtcggtgcttaactgggtgaagagatcgaagagttgcagttccgtttggctccacacctcgttgcgccgttcggacgagagctttgccccggggtgcagcagccgcagttcgacgctgtaggtcgcacgtccgtgcagacggccttcgacctccttgagccggatgggtggaagccaggctgcgggcagcaggacgatctcgcgcggggtgcggtcgtcggtatcggtgtggatcgtgtagccatacacgcctgcgagctcccggatcgcacgggtgagataggtgcggttcatgttgaaaaagttttgataaaatgtttatagatattgaaaagtctggataatttcctgacaacagaattgttgcgattgttgaaaaggtcggaaatatcctgaggccgtctgttgaaaagcggatttgtcgggacaaatataaacaatccgaataccccttgtcaagagattcgacccggaataatttcgatctgcggcaaataaagtcggcggataatttgttcggactggggttcaatctgttgcggtgacggtcgcagcggtctaatttggccttgaaaattggatatttgaaatataatagctacttttgctccgtaatatcttcgtgaagccggagtcttccggccgaaaagtggaaaatatccgtatcttccacggcggcgaagagcgaagttcaacgaaaaattcaacgatatggatgatggtgtcggttccaagcatagcggcagtgtcgtatctcaatacgataccattcatctacggtatccgtcacgaaggtaactttcgtgccgatctgttgttgtcccctccttccgagtgtacgaaaaactacgtcgaagggcgtgccgatctggcgctgcttccggctgccgccgttccctcgctcaaatcgacggaggtgattaccgagtattgcatcggagctgtcggccccgtgcgaaccgtcgtgctgttgagcgacggcccggtttccgaggttcggcgcgtctttctcgatccccactcccagacctccgtgcaactggtcggttatctggccgcccatcgttggaaaatcgctcccgaatggtactctctggatgactacgaacagcttcgtcatgcgcaggagggggacgctttcctgttgatcggggacaaggtgttcgatcacgaggagaagttccgctataaatacgatttggctgccgaatggcaggccgcgaccaaactgccctttgcctttgccgtctgggtggctcgcaagggaacgccctacgaagtcatcgaatcgctgcagcatgccctcacgttcggtttgaaacatacctacgaagcgatcctcgaagcgggattcgacaaaaagccgtacgatgcctatgaatatttgacgcgtaatatcgactatatcttcgataatcagaagcgccgggcccttcagaagttctgggattcgggactcaaggtgtcgccccgtgtaaatcccggctgaagggagtaggcagggctcatgccgccgggcggccccctgtcttgaccagttcacgcagaaagcaacccggggaaccggattaatacagggtgctttatgattacgatttacctcaagcaatacaacaagatcatccgaaacgccgataccgggctcttcgaggagttgggttacgacgatatcttgtggatcgatatgctgcaacccacgatcaaggagcagaaagcggtcgagaatttcatggagatcaacctccagaccaagcagcaggtcgaagagatcgaatcgacctcgaaatattccgaaaccgagaatgcgatcatttcgaacgccaactttttcgtgccgacgggcgagagtttcgtcatcgaacccgtgtcgttcatcatttcgaacgaaggtgtgctggtttcggtgcgccaggccgagtcgcggacgtttcaggagacggagaagcggctccagatcaactaccgcaactatccaacgggctatcatatttttatcacgttgctcgaagtgcggatcgactacgatgccgacatggtcgagctgatcgcccgtcaggtgtcgtcgttgagccgcaatatcaatggcgaggattcgatcgacaaggaggtgctgcgtcgcatcaataccttgcaggagagtacgatgttgctgcgggagaacatcttcgaccgccagcgcgtgctgtcgggcattctgcgcagcgaacggttcccgaacgatatctacccgcgtttgcagttgatgatcaaggacgtgaattcgctcatcaaccatgccgatttcagttttcagcgtctggactatatccaggatgcggcactgggtcttatcaatatcgagcagaacgagatcgtaaagatcttctcggtggctgctgtggttttcatgcccgcgacgttgatcgcaagtatttatggcatgaacttttcgatcatgcccgagctgcactggaaatacggctacctgtttgccatcggcttgatgttgctctgttcggggcttacgatctggttcttccgattcaagaagtggttataaagacagtccgcttcgacttcggcttcattttcgtcggtcggggtgttttttaccttttcagaaagtcgttcccgaaaccggggagaaataaagtacggatatgacaagacaaatagccgatccactgcggatcggctattttacaattacccgaatttgtgctgccggctattgcaacgcaggatcgacctccggcgtgcaggttatcgaggcggtcttgaccgtgccatccgaagtggtgaactccaccgtaaaagtatgcacttcgcccggattgtcgggaaccgacgtaaaataaagtataaacgagtaaatcgacaaggaggaaagagtgtattcgaccacccgcagatcgtcgggttgcaaagccgacaacggtttgttgtatagaaatagaatttctttcccaagatcggaataagaatgataatcgttctctatgtattcggcatagcttacataccgaactcccattttatcgttcaacggcgatcctgccgggtatttggcgctccaatctttgtcgctggtaacttttatgccggtgaaattgtctgcgaatgcggtcaaatccgaccatggaagcgacttcagattgttgtattccgtatcgtgattgcgctctgcgattcgaagaaaatcgtcggtatgctgcgccccctcctgttccggtgtctgatagtacaccggatcctccagaagtacctgaaatccggacatggaatagagcgtcgatggtttttcagccagcatgccgtataaaacatagctcccgtccacataattttgaacgagatatttcgaatagccggatccatttccaatccactcctccggttcgttgcaaccaaccagactactcaaaaaaatataaatcaataactttttcatttgctcaaattataagtgacggccgaaaaatcatgatcgtaatctctgtcttctattgactgcgggctgacaggtcccctgtctgtatagaacgcattgaatgtatagtatccgtctttttgtcctccccagccgaaattggcatgcacaaattctttcgactctgtgtggtattgagtaggcaaaaaagcatatctggttatcacgcgtctttcacggagcaaccaaccgtccaatacccatgcgtgactattagtactgctcttcccggaataataaaatggaagttttttcacgaaaatcatatcccgaactttgtcggtagttataggcgataaagctatatttgaatagcctaatcctatgtcacccaaatattggagtaacttcactacgtttttcgttggggcgggagaacctccgtcgtcactgtggtatttcacaccaactgcctctcccattttattgatgaaataggctacagcccatgtttgggcattcatggattccccacttacaacaggtttcactaactggggatgtgttaccgcttcttcgatattaagccacatggcttcattcaaaagctgatctcctatttgataaaattttttattataatttaaagcgttgaaaactaaaatttgtgcaactgctaccgggacacatccggcaaaacagtttttgccattttcaattgggcataaataattatatggtttggtttggttccatcgggttttgaggagaatgcctgattgttctttggtttcccaaggttcatagtcaataccgacaggttgttgtccttccggccaccaatgttctatatcggtaatagggcctccgacgatgccgtttccgccaccgccggtatcgacacctccgatcgcggcctgtgcaaccatttgcagggggaataccaactcaccgtccgcttcggcctgttcgggagtaaccgttacggcataccggaactcttcggtcgtgaggcttccttcatcgacgaccgcatagaccggctccaaccggtcgtcggcccccagaatggcatagcccgcctcgttctcgaaattgacgatgtagagcagatcctccacgtcggccgtggcttcgctgcgggtaccgccgggacttaacgcttcgggagaaaccgtcgtcacgtttttcacacgccgtatgccgccgctgcgggtgacagcgccgtcttccgccggagcgtcgatcgcctcgagaaggccttgcaaatcctcaagggcttgttcgacggggacgacgtgcgagattttctgctcggggacggacggaggttgggggacttcctctgtggtcaagtcactggtacagccgacaagcaaccctaaaattgccagtagcgacaaatacttcatgtttttcatatcaaattagggttaaagcgaataaaatgacaaattcagagatgtttttattaaaaaaacaaaaatcgtgcaattatttttgaatattcaaacttttgcaatgtgaaatcgagcgaaaaatcttttgtcggtttggatatatacgacaaaaccgaccgggcaagggcgtcccgccttccgtcgcattttcgcgccgacttttcaccatccttccctcccgccgcaccgaccggcctccggtccgttgcgcagatcgaaagctccgtagtaataatacccgttggctgtccctccccatccgaaattgcaatggatcaaacgtttgtctagagcgtctttcttgcgaaacaggactggagcggcaagaattttagcccgtattgaagttcgaccttatattatgctgttcctgtcggctatttattgcaacgcaggatcgacctccggcgtgcaggtgaccgaggcagtcttgacatcgccctcgacggtcgtccagcgaagcgtcagcgtatgctctttttcgagcgtcggggcactggtgaagacgattacaggggattttgtctgtgaactgaaatctgtcaatgaatagtaaaccattttcatgtcggcagcagtcaactccgacggacgcttttcgatggttttgagataatcgtaattttgcagaaattcatacttatattctcccatatcgtaaccgtcgtgtacgaaatcggaggaagagttgatgcgcacctgcaaaacatcgtcgagcgatgtcccggcgggatgtgcttcatcccagtcggcattgcttgtaacgaccattttactgaaattatcggcaaaagtggcgaccataggtaaagcaccgttagctaatacctgattaaaatcaatatcgttgtttcttgcagcccatcggttgaatttttcgatgtctggtccgtaaaaaaaatacattttgggagatggtatgcatatgacaaatcccgcaatctgttttttcgataacctatgtgcatcccccgaacattcgttttgaaattcagtcaacatgatctgcccatcgacatacaattcgacaaaatttttatggaacccacctagtccatccttttccgatttttcgcaggcgacacataatgtaacgatcgacaacagcacgcccaaatatttgattcgtttcataataggagattttaaggtatttccgtataagtaatcattcgcaaatcgtcagtgtaatttccatcttgggtaccttctacattatctatcccactttcctgatcaacaggctttgtcgtcgtgttaaaactaccgctaaaataataaccgttacatagtccattccatccgaaattacaatgaataagcgtttgtggaacctgctcctttgaagagattgatgtagtaccgttacgataataagtttttatataacgcattcgatataaccaaccatctatattccactgatgattaagttttctgccagtactagaatgtcctcttactatagttgttttttttcgatccaacatcatcgtacgtacataactatcacggtaagtgtgatcatttactcccttataaaggacataagtcaaaccatctcgagaatcttttagactcgcagaacttccatccaaaccataatccatattcaggacaacgccgattgcgtatattaacatagacacagctttggcttcaggagtaagagtggacggttttccttctgtggctataagaagattaggattctgaatcgcacgtctgatcaatgtccaatcgatcggagttcctttgatcgacccgactacagaaccataatgccaataatttgatactaaaacctgtgccacagcaatagccgaacatcctgcccaacaacattttccattgatttgtgtgacacttgcattaaaaggatacccttgtccccatttcaccgggatcagtggtccgactttttcttgagtgacataaacatattctcgtcttaaaacatcgccgcctaaatcccccgtgtgacgtccgtcgtcgctcataggtgcgactcctccatcagcatctgtatcggcgttttcgattccgatgatcgcagcctgtgcaaccatttgcagggggaataccaattcaccgtccgcttcggcctgctcgggagtaaccgttacggcataccggaaatcttcggtcgtgaggcttccttcatcgacaaccgcatagaccggctccaaccggtcgtcggcccccagaatggcatagcccgcctcgttctcgaaattgacgatgtagagcagatcctccacgtcggccgtggcttcgctgcgggtgacagcgccatcttccgcgggagtatcgatctcttcgaggacggattgcaactcttcgagagcctgttcgacagggactgcatgcggattttcagcagtcggagggttttcaccgaaaggccccggctccgcgcccggatcggccgtacagccagccacagtcagaacccgaaaaatagcgaaaaaagtccgaaatgtttcataacggattaatttcagggttttcggtcgaaccctgttccgagagttctgaaaattcccggaacagggccggaagaagttttcctcctgatccgaaattaaacatttctttgttgattaccaaataaaatacaattttatttgcaatcaaataaaacaaaccgcattcgggcttcgtcgcgcacgtcgcggtgaaagatgcccttgacggtcgccgccgtatcttcccggccccgttatttcgcactgccgtaatgccaggtgaccgcctgccggatgtcgggatggagcgatttgccgacgggacaggtttcggccgcgccttgcaggattttcttgtctttgtcgctgtaatcgcccggcaggtagaaatcgaaccggatctcggcgatgcggcgcggttcggcggccatgactttctggatctccacacgcgttcccttcaggtcgatttcgagccgacgagcggctatccccatcagggtcagcatacaacttcccagagctgcggcaaccatgtccgttggagagatgtattcgcctttgccgttgttgtcagtcggagcgtcggtgataacccggttaccggactggacgtgcgtgatttcggtccgcagatcgcccagatacaaagtttgaatcgtagccatttcctaaaatttttaagtgaatgtttcctgataaagatagtgaaatgtgagggcaatcgtgcggactcgcacccaaaagattgccgaaccgaatcctatcttctgcaaagatagggaaagccgagagaaaaatggaaacttgggcccagttttccgaaccgcatcctatctaagactatgtcaaagatagggaaaagtgagtgacaagccaaacttgattagcatttcttctccttgcgcggcgaaatccacgagagccttccgcatccgctccgatcgtcggtcggtcgagccagcccgagccgcatcttgtaaaaccaccgtttttcggaaagtccggaagacaggtccgccatgcccgaaattccgttccgcccgttccgcgtcctctccgatccgagcagcgacggagggcggcacacccggaccggatatttgcccggaccgggagaccgaaagcgaaataaatttcgtacatttgtcctccataaggacttatgctcgaaaaactcgcaaaacagaccgccatatacggcatcagtacgatcgtcgtacgattcctgaactacctgctgacaccctatttcacccgggtgttcgacccgggcgtttacgggatcaccgtggacgtatatgctctgattccgttcgctctcgtgatcctgacgatgggaatggagtcgggatacttccgttttgcggccaaagccgacgaagcgggcggcgacgtgacggccgccaaacggcggttgttcgctaccacatggggcatcacttccctggcggccttgctttttttcgggctggtaaccctcttccgcacgacggtttccgagtggatgggagcggattacgccgcaaaccccgacttcgtagtatgggtcgcggcgatcattttcctcgacgtttgcacggcgattccctttgcacgcctgcgggaacagggacgagcgctgacctatgtcgggttcaaggccctcagcgtcgtaattacggtagttttggcagtggctttcggtcttgccggattttacgaaacatcgttcggcgtaggctgggtcttcgtgggcaacctgatcgccagcctgctcaccctattggcaattctcaccacgacgaaccgcactctgccccgtatcgacggcaagttgctgcggcgggtgctcgtctattcactgccgctgatggtcagcggcatcgcaggcacggccaacgaattcatatacccccagatgatcaagtacctcgtaccggaaggtgcgatgggcgaagtgggtatttacggagcgatcgttaaaatcggtatggtgctcatgcttttcgtgcagatgtaccggttggccgccgaacccttcttcctggccgattataaaaaatcggacttcttgcagatgaatgccgcagcacttaaatactacgtgctggtgtcgatgttcatattcctgggaatcgcttttttccgggatcttttcggactcatcgtcggcaaggatttccgcgaaggaatcggcattttaccggtggtgttgggtgcgaacgtcctcaacggcgtatggctcaatctgtcgttctggtacaagcgggaggagcgaacctcgctggctatcgtggttacctttgtgggcctgatatttacgatcgggtgcagcctttcatttattccccgctggggatactacggcgcagcctgggcccgtttagtcagcgaagcggcgatggttgcggtaagtttttggctcaaccgccgtttttatcccatgccttaccagaccggacggattttgggatatgtagcgttggcgctggcgctatacggcgcgagtgtcgtcgtggatgagcatgtcgctccggctgtacccagatatgcttgctacgcggccttgttgctgctctacttttactatgccgtgcggcgggaaaagatcgaccttcgggcactggtccgttccgtaatgcaccgggggcacaaatagcaacgaaagatgagtgaaaaattgattatattgctgctcagcgggacgctgctcatgaccggagtcatggccctttcgtgggaacccggccgcgatcgcacgctgacgctgggactggttctggtggcgatgctatgcatcgcggtccggcagcggctccggcgggtgcagcggaacagaaagtaaaatgcggttttcggaggtcatcggtcagcgggagctgaaacgtcatctggtgcgcggggtcgataccggaagggtgagccatgcccagctcttcacgggacgtcccggagccggggcgcttccgctggcattggcttatgtacaatacctcaactgcacgaaccgccgcgacggtgattcgtgcggcgaatgtcccaactgccggcagatcgccggtctggcgcaccccgacctgcacttcgtcttcccggtcaataaacagggtaaaaaatcgggagaagcgattttgagcgacgacttcatgccgctctggcggcaggtcgtcagcgaacgaaacggttatttctcgccgcaggagtggtacgaccgcctcgacctgggccggactctcaaaggggcgatttcggcccgcgaagccgacggtatcatccgcaagctctcgttcaagagctttgccgccaagtacaagtgcgtgatcgtatggcttccggaaacgatgaacgaggaggcggccaacaagattctgaaaattctcgaagagccgtgggaaaagacgctcttcgtgctggtgagcgagcgtcccgacttgttgctgcccacgattctgtcacgaacgcaggaggtggtcgtaccccggctgaccgatgaagaggttcgtgcggagctcgaacgccgtggggagcgcgatccggagaaaattcgtacctttacccggctggctgcgggcgacctgatcgaactggagcatctgctgcgcggcgaaggggacgaactccgcaaagacgatttcgaatttttctgttcgctcatgcggttgagctacaacgacaagcacctcgaactgatggcctgggccgaagaggtcgcccaactttcgcgggagcagcagcgggctttcctgaccgatgcggtgcgtcttttgcgggagagttacctgctgcatgcgggactgggcgaaatctcctgcctgtggggtgaggaggcgaagttctgccgcaatttcgcgccgttcatcggaaaccagaacatcgaatcgctggtcgcggaggccgaatcggcgatggcccagatccggcaaaacgggaacccgaccatcgtgttcacccatttcgcattgagcgtgagtaagatgattaaaaaattgtagttatggcaagagcgatcatactgaccggaggaaacgtgggcgacgtaaagacccgcctgcaaaacgcacagcggctgatcaaccagcacgccggacccgtcatgcgctgttcgcaccgttacaagagccgggcatggggtttcgatgccgaagaggagttttccaaccaggtcctcgaggtggataccgacctgacgcccgaacagttgctcgacgctttacaggcgatcgagcgggaactggggcgcgaccgcgaggcagaacagtcgctcaaacaaaggaccggtgcccgatatacgtcgcgcccgatcgacatcgacatactcttctacgacgaccgcgtgattcgcaccgagcggctgaccgttccccatccgttgatccaggagcgcgaattcgtgctcgtccccctgtgcgaatggatgcgcgactaccgccatccggtgttggggaaaacggtcggagagctgctcgaagagctgaaaaatcggaatgaaacccatgaaaaagcataagttcaagatactgactttcgtcgcggtggccgcagccctggcggggacgggatgtttcaagtcgatcggttacgaaacattctacgtgctccggccctgggcgcaggaaggtaccgtcaagacccccatcccccgggaagatatgctggcctatgccttcgacgcggacacaaccgaatggagcgtgctctcttacgaggacgccgtggccggaataatcacctcccggagaaccggcgagaagctgcggccgatcgcccagggcgagccatacgagatcgacggcaacgaaaactggctggcgatgcagctcaacggcccccggtttctcatcctggccgtggaccagtcgaatcggctttacggattcaccgagcaggccatcggggagaatcttccgcagatgcacgtgagcgtaaccttttacccgaaagaaaaaggcagacgtttcctgaagggcaagtggatcatgtgcaacgacttttatacggaacccgagccggaaccggatcctgatcctgaaaatcccgacacgcccgacacgcccgataacccggacaatccgggaacggaagacccgaatcccgacgatcccggtacgcctgacgacccggatacccctgaaaatccggataccccggacacaccagctccggacgatcccgatacgcccgaaaatcccgacaccccggaaaacccggatgtgcccgataatccgaatccggacactcccgacgaaccggcagtttccggcgcccgctcgtccttgtttcgataacagaaaaacgatatgaaacgacaaaaccataaagcgatcgtctggcttcgggtctgcgtccttgcgatgttctgcccggcgttcctgtggcgctgcgcgaccgtcatgaacctcgaaggcggcccgatcgacacccttcccccggtgatcgtgtcgatgttgccggacaacttcacgaccaacttcaccgccagcaagatttacgttactttcgacgaattcgtacagctcaaggaccagcaaaaagagtttttcacgtcgccccaaatgaagaaaaaaccccagctttcgatccggggccggggcatcctgatccagatcaaggatacgctcaaggagaacacgacctacgcgctgaatttcggcagtgccgtgcgcgacaacaacgagggtaatccgctctactcgatgcgttacgtcttctcgaccggcccggaggtggattcaatggtcgtttcgggatatacggccgacagctacacggccgacagcgtagccaagagcttcatttatttctttccggccgattcggtggaggatattcccgaatacgactcgacgatgttcaaataccagcctgcggtgatcgcccgtgcggaaaccaacggtattttcatcgcccagaacctcaagccgattccctaccgggtctatgccttcgaagataagaacaacaaccagatttacgaaccttcggtcgatcaggtaggctttctcacgggaacatataaccccgccgagctgcccgacttcggcatctggtacgactcgatccgccgctacgtgacggccgacccgcagctttacttccgaatgtttaccgacgaggctttcggtcggcaatacctgcgtgaatcggaacgtccggtgcagcacaaggcgctcctctatttcaatgcgggccatccccggatcgacagcatcgtgttcgacagcatccctgccgaccgcgtaatcattgagcctcaatcacgcaaccgcgatacgatcgcgttgtggttcgacgttccttcggccagtctgcccgataccatccggggagaaattacctacatgaagcacgactccctcgaccggctgcttccctcgaccgagaagttgaaactggcctggcggtatatcgaatcgaaagaggaggctaaagagcgcgagcagctcgaaaaggagaaagagaagacactggctgccggcgaagagtgggtcgaaccggagaagccgagtacgtttacctacaagttttccacgaccggttccgttacccccgaaaccaagctgtacgtcgaattcgactatccgctggtccggttcgactcggctgccgtcgtgctgaccgaacagatggacaaggaggaaccgcgtccgatccggatccgatggcagcaggatacggccaacatgcggcgctggtggctggatgttccctggcaattgaaaaacaattatgccctgaccatccctaaaggagcgttggcggatgtggcggagcagcaaaacgattcgatcgcagtcaattacacgggtgtcgatcccgagaaattcgctacgttcatcgtcaatgtggtcggtaaaagcgacgaggcgagctacatcgtgcagttgctgaacgaatcgggaaaactccttcaggaaaaaaccggcgtgcacagcggagtatgccgtttcaattacgtaccggccggcaacgtgaagttccgcatcatcgaggacatgaacgataacggccgctgggacacgggcaatctggtggaacggcggcagcccgagcgggccgaatactatatggacgataaaaatatcgataccttcgcggcgaaggagaactgggaagtggaacttactatcgatatgaacaaggtattcgcgccggtaacgatgcaatccctcgccgagctgctcgaaaaacgcgaagccctgcgcttgcaaaaggtgctggaagagcgggccaagaatcccaggcggaacaccaacagcaatacctcgaacacgacgagcaccatgggcggaggattcaacagcggtatgaacacgatgatgaacggattgagatgatgaggcgtttaggaatgatatgcctgttcctcggagcggtgctgtgcggcggcacagcggcggcacagcatacgctgggcgtaacgggcggttacggctacggcaatgcccggttctatcccaaagaggaaacccgggtggtctggggatgctacacggcgggcgtaacgtggcgctattacggaccccagcgtttcgtaggcggtttcggcatcgatttcgaatatctgcagcggggattctcgtttcttcagaatccgaccgaagaggacccggccaaataccaatggtacacgcgtcgcgtcaagtcgctgatgctgccgatcgtctggcagccgcacatctacctgttcaaaaaccggatgcgcgtctatctcgatgcggcagccttcttctcctacaacatctcctcgacattcatcaacgaagaggcggcaaattcgtctcggggacaggacaaaggtccttggcggggagagtacggattcaaagtggcccgcgacaaccgttgggggtacggtctggcgggcggcggcggtatcgccgtactggtgaagcaactggaattcagcgttcgggtgcgttactacttcggttattcggacctgctgcgcaaccacaacaaatacgcgggaaattcgacggacggaaacgagaatccgtttccgcagacgccccaccgatccccgctcgataacctgaccttcagcatcggcgtcagctaccgtttcaacaagtccggtttcacggagtggaataaccgtccgcccaagcgggacaagaacaaggaggttttcaactacaaaggagtcaaaaaataaccgaaatatggaaactacacgccagcaaaagatcgccaaacagattcagcgcgacatggccgaaatcttccagaaggagggggccgaaatcgtacggggagtgctcgtgacggtaaccgccgtgcgggtttcgcccgatttttcatacgccaagatctacgtcagcgtctttcccttcgaacagaatgccgctgtcatggccacgctggagcagcacaattggttcctgcgccgggcattgggtcagcggattcggaaccagctcaagacggtccccgaaatccagttcttcctggacgattcgctggagtacatcgagcagatcgaccgggcgatgcaccgcgaggagtaacctgcgatccgccgaaggccgatgctcacccgattctttgcccgccgctatctattttcaccgaaatcccgttcggtgatcaacgttattgcgggtgtgagcgttctttcgttcgccatgcccgttgcggcgatgatcgtgctgctgtccgtgctgaacggtttcggagatttcgccaagtccatgtcttcggccttcgatgccgatctgaccgttgccccccgtgaagggcagaccttcgcatctgcggaaatcgacagtctggcgctgacccgcgtgaaaggggtcggggtcgtttcgtacctgctcgaacagcaggttttgctcgaacgggacggtttgcagacgatggccacgttgcgaggcgtggacgaccgttatacagaagtgttcccgatcgaggaaacgatcccgctgggcagttggagcgttcgcacgggcgatctcgaccgactggtgctgggacgcgacatggcccgcacgctcggaatccggtctttggtccgtgccgaagtcgccgtctatgccctgcggcgcggcagtttctcgtcgttgcttcccgtcgatggatattcggtgcggcggctcgacgtcggaggactcttctttctcgatttggaaagcgagaatgaatacgcacttacctccctgcgtgcagcccaggaacttttcgatcgtccgggacgcatatcggcgatctcggtgcgcgtagccgacggtgcggacgcggaaaaggtccggcgtgaaatcgccggaatcgtcggcgacgatttcacggtgcgcacccgcgacgagatgaacgccctcttcttccgactggttgcctacgagaaatggggcgttttcttcatttcgctgctggtcctggtgctcgcctcgttctcggtagtcgggaccctcgtgatgctgatgatcgagaaacgggacgatgtggccacgctgcgtgccctgggcgccgatacgaagctcattcgttcgatcttcgtcggcgaaggactcctgatcggcggtctgggggcgtcgataggagccgtgctgggcgtaggcttctgcctggcacagcaacatttcggaatgattcgcatcccggtcgatacgttgttgttatacagctatcccgtagagatgcgctggagcgatttgctgatcgttgcggcggctttcggggcggtaattctggcgatttcggagctgaccgtgcggagtgtgatgaaaaacaacaaactatgatatgaaacgattgatccgtctgttttgtctgatcgcggcggcaaccgccctcggttcctgcgcccgggacaaggtgatccccgacgaggagctggcccggattttccgggatgcctacctcatcaacgcctacgtttcggaccggggagtgaagctcgactcgctcgaactttacgaaccggttttcagccgttacggttacacggccgaagatgtccgctatactatcggcaacttctcacggcgcaaaagcgccaagctgagcgacgtggtcgaacaatccatccggctgctcgaagaggagagcgcctactacaagtacgaagtcggcgtactcgatacgatcgacaacgtggcccgtcgccgtttcacccgcacggtctattccgactcgctgatccgggtcacccggatcaaggacaccgcacggcttcgggttcggattcccgacacacgtcccggcgaataccgtgtgtcgttcgactacctgatcgactcgctcgatgagaacctcgcgccccgtatgcgggtatggctggtggaggccgacagttcccgcaagggcgaatcctcctcgatcctgcggaagtcgagccgggagcgtgtttcccggatactccaggcggacagttcggcccgttcgctcgtactctccctgtacgggacccgcgaaaagttcaggcgtcccgacgtgacgatatacgacctgaaagtatcctatacgcccgaaaccgcagaggccgtggacagcctctacatcgaccagttgggtcttaaaatcttcgccgatgaattcttctccgtcttttcgccggatagcctccaactacctcttcacggggaggcatctcgttaaacacccgctggtgacggttcgggccgacggacgcatcgaatccgtcgaaacgtgcgccgcgccggacggcagacccggtgtcgaattttacgcgggagtcttggttccgggacttatcaatgtccattgccacctggaactctcctacctgcggggcgctattgcccaggacggcggcttcgccgctttcgcccggtcgatgggccgggtgcggggacagttcagcgaacaggagcgggctgcggccatcgctgcggccgacgcccggatgtgggcggaggggatgcaggccgtaggcgatgtagccaacggagattcggcctttgccgtaaaagcccgcagccgcctgtcgtaccgtactttcgccgaagtcttcgggctgcatactgactcgacggacgaacagcggcgtctgctccgctatcccgaaacctcgctgacccctcactcgatctactccgtgcaggatgcccttttccgggagatttgcgcggagggcgacgaaccgctttcgatccatttcatggaaacgccggctgaagccgaactcttcgaacagcgcggcgagttgtgggagtggtaccgaaaggcgggttttacgtgcgatttcctgcattacggctctccggcaaggcggatcgtggagagcgttccggccgaccggagcgttattctgattcacaactgctgcgtgaatcagcaagatatcgatttgataatgaatcatttcacggctccggtctggtggtgcctgtgtcccggatcgaaccgttacatttcgcggctggttcccccggtggaactgtttcgccgcaacgggctgaatatctgcctcggaaccgattcgctggcgtccaatacagcgctttcgctgctcggcgagatgcagcatctcgggaagatacctcttgcggaactcctgacctgggccgcaccgaacggagcgcgtgcactgggtttttccgagctgggcgaggtcgctgcgggcaaacggccagggctggcggtgctgtccggactggattacgactcgatgacgctcacgcccgcatcgtgcatcgcacggattctctgatcgggcgaatgcaggcctctatttccgtcggcaaacgctccgaatcagaccgggaaaaggagcgactcccgaaaaaagacaataacgataagggacggaattcctccgtcccttatcgttactgttcccgtcgattacagcggcaggtacttttcgaccgtatcgcgcaggtgatcgccttcgagatgggtgtagatttcggtggtcaggatgctctcgtgccccagcatctcctgcacctgacggatcgaagcgcccccttcgagcagatgtgtggcgaacgaatgacggaaggtgtgagggctgatgtgcttgtcgattccggcccggtgaacggcttcgcgcaggatcgtaaagaccatcacacgggtaagctgcgtcccgcgattgttgaggaacacgacgtccgatgcggacattttagtcgcccggtcgtcgaggtaacgctgaatcttttcacgagccgccccgctgaccggtacgaggcgctgtttgtcgcccttgcccgtcacgcggatataaccttctccgaaaaaaaggtcgcccaaccgcagcgaggtgagctccgaaacgcgcagcccgcacgaatagaggacttcaagcatcgcgctgtcccgccgccccttgaccgtagaggtatctacggcggcaatgatgcgatcgatctcttcgaccgtaagaatgtccgggaggtgacggccgaatttgggcgtatcgatgaactgggtcggggtagaatcgaccacgtcggtcagcatcaggtagttgtaaaagctgcggataccgctcaaagcccgtgcctgcgaggttttctcccgtccttgatcgtacaagagggccaggtagcgctcgatcatcggagcttcgaccttgcggggcggcacgtcgtagaaccggaggatgaagtgggcgaactgacgcagatcgcgcatgtaggattcgacggtattctccgaaagccgtttttccagtttgatataaacgcggtaactgcggccgatttcttcccattttttgagagtttctgccatttttatttaactttgtagaagataggatacgcctcggaaaactgcgagcaagctcccgttttcttctcggctttcaaagataagacgcggctcggacaagctcgaacgaccgacgctcgaagcatacgcagaggacacttgtgaactctgcctgcaaggaggaggaaaacagaaagttaagtttggcttgccgcttgcctatcattatctttgcagaagataaacttcgccccggcaaagtccgcataaattcggcactgcgcccggcccgattgtcttctcagaggcgaagatacaaaaaaattttacataatattatttcgaaagactttttgccggttctttcgaccgaaaaacgatataccgatatggattatgtggagttgaacgtccgggtcacggatcccgagttggccgaaattctgacggccgaattagccgagctgccctatgagagcttccagacggagggcgaggtgctgaaagcctacatcccccgcgagcggctggcggactgcatgcagcaaaccgacgacctgctggctcgctacggcatcgccgaccggcgttatatcgccatcgagtcccagaactggaacgccttgtgggaacagaatttcacgccggtcgatgtcgatggacgcatcctgatccgggcaccgttccacgcgccgcagcagggctacgaactggaggtggtggtaatgccccgcatggctttcggctcgggacaccacgccacgacctgcctggtcgcgtcggcgctgtgcgacctgccgctggaggggaaacgcggactcgacatgggctgcggtacgggcgtgctggccatcgtagcggccaaacggggtgccgcgacggtcgatgccgtcgatatcgacgagtgggccgaggccaactgccgcgaaaacgcggcggcgaatgggttggcggagcggatcgtcccgatgctgggcgacgcaggccgcatcgcgggccggaaatacgatttcatcgcggccaacatcaaccgcaatatcctcacgatggacatgccggcctatgccgaggcgctcgatacgggcggtgatctgctgatgagcggattcctggaggaggatgtaccggtcatcgaagcacgggctcgggcctgcggcctggatccgatcgaagtgcgtatgcgcgatggctgggcgatggtgcacgtaaagaaagcgtgaggtgccgggaacgctcaagacatacaaggcgcggggaatcgtgctcaattcgctcaagtacggcgacagcgcgatggtcgtgcacctgctgaccgacgcgttggggcgtcagagttacatggtgcagggtgtccgcagcagtcggggacggggttcgaaactggcgttgttccagccgatgttcgccctcgaattcgaagggctgacctcttcgcggcagcagatgcaccgttttcgggaggtgcagagcggaatcgtcctgcaacgaatgcctttcgacgtgaggcgctcgacgatcgccctgttcatggcagaggttttgtgccgtcttgtcaaggagagcgagcctgacagccagttgttcgatttcgtgtgggagagtatcggggcgctggacagtatggaagagggcgtggccaatttccacctctggtttctggtgaatctgagccgtttcctgggattttatccgggaaacgaatatatgcccggcgcctggttcgatgcctgcgaaggatcgtacaccgtgcaaaagccgccgcatgcgacggtaatgaccccggagaacgctcgtctaatgaacgacttcgtggagtgcgacgtacgttgcctggccgaaataggactcaaccgtacacagcggagcgcttttctggaggctttgctggcctactacggttaccacctggacgcgatccacgccgtgcagtcggtccgtattctgcaagaggtgttctgaccgggaaaccgacatcagaggacaacggacttttccggcaggcgacgacgcagagcgcttctccggtgtaccgggtgcggaagcaaaggcgaaccggaagttttgccgggtactgaaaaacgaaagaaaacagttcaatgttatgaaacgaattttctacagcctgcttttcgcaggcaccgtatggacggccgcaggccagaatccgcccgaaatcaaaactccggaccggaaaacggccgagcggatcgaagagtattatctgtcgaagatgctcccggattcggtgcagatcaaagcaccctccctctatccggcggactatttcagtccttcgaccaccatgacgccggtgatttcgatgagttcgctcatggagatccgaaccaaatacgcactgcgccgcatagatatcgttccctacaaaatacgcagcggctggttctcgatttccaacggccaggcccagaactggagtccctatccggacgggcatctcgacgcccggaccctctcgtttcccgtaccgcggtaacgaccccgatcttgcgttgtgcggctggtcatcgaggacgaccgtaccgtttttcaaaccgacattccgtttcccggagcgaatttgctccgggaaattttcgtttccgactcccgcatccgcaaatttgggtatttatgcgtaacggattccggcaaaaaaatcgcttctttgcacacttgttaatgtgtagtttatgaagaaaagtttgattcgacaacttaaaagcgaagactgggtgatcgtcggggccggcgcagcgattctcctgctcgccctgctgttcccccgttggatgcctgcgatgcccaaagacctctcctccgccggaaattggatgagcgccggagcgatgttcctcttcctgctggttttgacgggtgtctgtcagcggatattgggccgcccgctgcgtcgtttcgccgtttcgctgctcgccattttcggtgtggctctgctgtcgcaagccgtggcttcgatccccgcaattaaacgactgggcttcgaggcggttttcttttcggtgatcttcggcctggtcatcagtaactttttccgggtgcccgagtggttgaaaccggcgatccagagcgagttttacatcaagatcggtatcgtctgtctgggtgcgacgatcctcttcggcgaagtgctccaatcgggcgtttacgcactgatccaggctttcatcgtcgtctttacggtgtggtacttcgccttctggctggcccggcggatgcgtgtggacgaggaaacctcgacgatgctcgccagctcggtcagcatttgcggcgtttcggccgctatcgccacctgcggcgtgatccggggcgacaacaagaaactctcctacatcatttcgctggtgctggtctgcgccgtaccgatgatgtacctgatgccctggctggccggtctgctgctgccgacggtgctttcgaatcccgaaaccgtgcaggaggtcgccggagcctggatgggcggaacgatcgatacgacgggtgcggtcgtagcgtcgggtgctctgctgggtgaaacggccgaacagacggccatcatcgtcaagtcgtcgcagaacgtcctgctgggtatcgcggcgttcgtcatttcgctgtattggtcctacaagggccagaataagcgccagcgtcccagcgtacgggtgatctgggagcgtttcccgaaattcgtcgtgggtttcgtcgccgtatcgctcctcttcagcctgttcttcgccggcagcgaagccgcgccggcccgcacttcggccaagatgttcagcaatacgctcttcagtatcgcgttcgtctgcatcggcctcgaaacccgtttccgggatattttctcgaaggaaaaccgccgcacgttctgggctttcatgacggcccagatgttcaacatcgtagtcacgctgatcgtggcctacctgctgttcggcgtactgaaaccctatctgaattaggatcggggaatccgaaaggtacagcaatcggcactcttttgggagtgccgatttcgttgccgggctatcgtttgcggcggaagaagtagcttttctgcctgcgtttctcctcctgcgagcgggcgacatagaccttttcgcccgtataggggttttcgcccgtgtagaacatcaccgacgaaaaggtcatcggtgtaggggtcagatcctgcacctgctccaggtcgaagtggagtttgcccaacaccttgtccgccagcgagcgcatgtcgcgctccgtgcatcccgggtgcgaggagatgaaatagggaatcagctggtacggcagcccttcgcggcggcagatccggttgaagtcggcgttgagccgttcgaacatcgcgaacggcggcttgcgcatcagtttcagcacagtatcctcggtatgttccggcgccactttgaggcggcccgaggtatggtggcggatgaccgtatcgaggtaatcgctgccgtcgaacaggtcgtagcggataccgctgccgataaaagccttcttgacccccttgaccgcccgcactttggcatagagatcgagcaacggacgatggtcgttatcgaggttggggcacatcttcggatgcaggcacgacggacggcggcatttgctgcacagctcccggtcgcggccgcccatgcggtacatgttggccgaaggcgctccgatgtccgaaaggtaaccccggaaatcgggcatgcgggtcacccgctctacttcgcgaaggatggatttttcgctgcgcgaagtgatgaacttgccctggtgggccgatatggtgcagaaggagcagccgccgaaacaaccccggtggatattgaccgagtgcttgatcatctcccaggccggaatgtcgccacgaccccggtagcgggggtgcggcgcccgctcgtacggcagatcgaacgaatgatccagctcctcggtcgtaagcgtcgcgttgggcggcgtgatgaccgcatagcggtcgccgacaccttcgacgagcgtttcgtccggttccatcaggttgctcaaggtttcgatgcgggtgaagttcttcccaaaggcccgcttgtcggccacgcactcctcgtaggagtgcaggcggatcgttcgggtgggatcgagccgctccacatagctgcggtcggccatgaatcccacctgtcggatatttcgcaacaacttggcgttgaatccgttgttcatcgcccgcgccacctgttgaatcacccgctcgcccatgccgtagatcaaaaggtcggccccgctgtcggcgaggatcgagggatggagcgaatcgctccagtagtcgtagtgggtcaggcggcgcaatgaagcctcgataccgccgatgaccaccggcgtacgcggaaagagccgcttgagaatctgcgtataggttttgaccgcatagtcggggcggaatcctgctttcccgccgggcgtgtaggcatcgttgctgcgcaaccggatgttggcggtatagtggttcaccatcgaatccatcgccccggccgtcacgccgaagaagaggcgcggagtgccgagcttggtgaaatcccgcaggtcgtcccgccagttgggctggggcacaatcgccacacgatacccttcggcttcgagcagacggcccacgacggccgcgccgaacgacgggtggtcgatgtaggcatcgcccgtgaagaggatcacgtcgagttgatcccagccgcgtgcgcggacttccttgagggtagtgggcagaaacatttcaatctcgatttttattcttccgcaagccccgcagcggcataggcgtcccacttagccaacacggtacggaaatcttccggcagttcgctttcgaaatagacctgttcgcccgtagtgggatgctggaagccgaggcttttggcatggagtgcctgccggggcatcgcggcgaagcaattttcgataaactgtttgtatttgttgaaggtcgtacccttgaggatgcggtcgccgccgtaccgttcgtcgccgaacagggggtgtcccttccactgcatgtggacgcggatctggtgtgtgcggcccgtttcgaggcgacattcaatgagggttacgtaaccgtagcgcttcagcacccggtagtgggtcacggcgtgcttgccgtccgagccgtcttcgaagacccacatcttctgccggtctttggggctgcggccgatgttgccggtaatggtgccttcgtcctcctcgaaatttccccacactagcgccacgtaccgccgcgtgatcgtatggtcgaagaactgtttggcgagccgggcgtgcgcccgctcgtttttggcgatcaccagcagccccgaggtgttcttgtcgatgcggtgcaccagtccggcccgcatatcgccctcctggaacaggggcagattctgcaaatggtatgtaagggcgttcacgagcgttgcggagtagttgccgtgaccgggatggacgaccatgcccgcaggcttgttgaccagcagcaggtcgtcgtcctcgtagggaatttcgagcgggatgttttcgggaatgatctcgatttcgcgcttgggatagggcatcaccagcgagatgcggtcgccgggtttgaccttgtagctcgacttcgcgggtttgccattgaccaggatattgcctgcgtcggcagccgtctggatgcggttgcgcgaacaacgctccatgtggatcgtcaggaacttgtccaaccgcagcgggctttgcccccggtcggccgtgatgctgtaatgttcgtacagctcgtcctgctcgccggcagcgtcgtcctcgagttcgtccggatcgggtatgtattgcgattcgctcatcggacgtgtgcgttattggaaaaattcgtcttccgctgtctcttcgtccgggaaaagcccgtcgtcgatgaccggctccgcttcgacgggacggttggccagactgtccagacgaacacgggccagcgaatcggccgtttcagcgtcgaggcggcgcagctcttcggcggcttttatcatctccttatcggccgcagcgctctgggcggtgactttggcagcatcgagggtcagcttcagatcgaccttcgcacccagccgggcacggctgccggccgaaggcgtctgcagataaacccgggcttcccgctggttcagcaggttgattccctcgtcgaaggagatcttgccgatgttgagccccagctcccacaaacggcttttggcctgttggaggtgaagccccacggtcttcggcacgagtgtcgaaacggaaccgctctccccgacgtaaagggtgacgccgctgcccgcttcgagctgtacgcggcttttctccgagatccgcttgccgtcggcgtactcttcgagcacgtaattggtcgccaggtcgggacgatagacgatctgttcgatccccaggccggccacttcgagcatgttcttggcctggcgcagcgaacggccggcgacatagggcaccgtcaccatcttctgtcggtaggagttgatcgtgacatagaccgttcgtccgggtttgaccccgacgcccttttccgggagttggtccagtactacacccccgtcgtaggcaggcacatacagcgagtcgttgacgatgatttccaacccctgacggcgggcctccccgagagcctcctcgagcggaatgcctgtcaggtcggggaccgtacggtgcgcactgtggcgcgtgcccagcaacagcagcaggtgagttgcgacgcccagcacgagcagcacgcagacgatgatgaaaaggtgtttcaggaaaggatgctcactgactttcgcccaatattttttcagttgttccagcatggtattgttctgtcgtttatgttcggggatcggccctgtctggcgggtacggaccgatccgtttcgtctgtttcaggtagcctcgttatccgatttcgcggtaaaaggtgtcgcgttcgacggcccggtagccggctgccgcgacgatgcggcgcatctcctccgtagtcatcgccgggcgctggtcgtcggctccggccatcgagtagattttggtcgtatcgtcgatcgtgccgtcgatgtcgtccgcaccgaaagccagagccagctccgtagtcgctttgccgtacatcacccagtaagccttgatgtggggaatgttgtccaggtagatgcggcttatggccagcatccgcagatcttcggtcacggaaacctcgccgatttccgacatacggttgccgaaattgcggtatttgagcgggatgaaggcgttgaagccgcccgtcagatcctgctggctgcgcagccggtcgaggtggtcgatgcggtgttcgacgcactcgatatggccgtagaggatcgtagcgttggtcgggatccccagccggtgtgcggcggcatgcacctcgaaccactccgcagtcgagcccttatcgggacagatgcgggcacgcagctcctcgtcgaaaatttcggcacccccgcccggtatcgcctccatcccggcgctgcggagcagacgcaacccttcgtcgatagtcagccccgctttgcggatcatgtaggagagctcgatggcggtgaaggccttgacggtcgcttcgggcaggatcgccttcacgcggcggatcatctcgacgtaatagtacaaatcgtgctcgggatgcacgcctccgacgatatgcacttcggttacgccctgtccggcgtggtcgcgggcgatccgttcgacctcttccagggagtagtcccacgcctcgggacttcccttcggacggcggtaggaacaaaaattacagttgaacacgcacaggttcgtgggttcgatgtggaaattgcggttgaaatagaccttgtcgccgctcacgcgctccttgcgccgggcggccagctcgcccaacagccaaagcggagcttcgtgccagagcacgagggcttcggcaggggcgatccgctcgtcggagcggaccttgcggacgatatcttcgagttgcggggacattatttcggtgctttgcgataaagataaacagcgatacagaggtaaagtatgttcggtatccagacagcgatccagggcggcagcgtaccgctcttggcaaactcctcgaagaagcggatgaagaggatatacgagaagcaaagggcaatgccgatgccgatgtggagtcccgtgccgccccgcaccttgcgcgaggagagcgaaacaccgatgagtgtcagaatgaacgtaccgacaggataggcgtaacgggcgtgttgttcgacctgaatgatgttgatcgagtcggaacccttgcttcgctgctgttcgaggaactggttcagttccactatattcattgtttttatcaactggtcagtgcgccccaattcattgacatccagattaatgagtgtgtccagattacggtgttgcgtgaaagtttccacgccgagcgaatcgaacgtgcgggtggtatatcgtcgagccgaccaccgcttggtttcgggattgaacctcacctctgcggcttcgagcgatgcggtcatcgctcccgattcgtactcttccaggctgaagaacgaagcctggttcgattccttggagtagttgcggatataggcgaacgtaccgggttcgatctgacggtagatatttttatcgtattggaaacgcgccttgcgcgggatgtattggttctcgaaagccacgcagctgcgctgcgacaccggaatcaaccagaggttcaaccccagagagagcgaagcgatgatgagcgcccccaggaaatagggccacatcagccttcggaaactcatgccgcccgaaagcatagccacgatctcggtctggtaggccattttcgaagtgaagaaaatgacggcgatgaaggtgaacagtccgctgaactggttgatgaagaatggaatgaaattcaggtaatagtcgaagatgatcgccttgagcggcgctttcgtctccgtaaagttgtcgatcttctccacgtagtcgaagatcaccacgaccacgatgatcatcgcgatagcgaagaagtaggtgctcaagaacttgccgaggatataccggtcgaggatcttgaatccggggaagcggaaatgcgggagctttcgtttcatcgtggttcgagtgttacagcctgcggccgagtttggcgaccatccgctccttccaaggggtgaaatccccggccccgatgtgtcggcgggcctcggtgaccagccgcaggtagaatgcgatgttgtgcagcgaagcgatctgcgccccgagcatctcctggcagatcgtcagatggtgcaggtaggctttcgtatagacgtgatcgacgaaggcggtgccttcgggatcgatcggggagaagtcgtcctcccatttcttgttgcggatattgatcgtgccttccgaggtgaaaatctgtccgttgcgtccgttgcgcgtgggcatcacgcagtcgaacatatcgacgccccgggcgatgccttcgaggatattgatcggcgtgccgacccccatcaggtagcgggggcggtcttcgggtaggatggcattcaccacctcgatcatctcgtacatcacgtcggtcggctcgcctacggcaagaccgccgatggcatagccgtccgcgtcatactgtttgacattttcggctgcccgcgcccgcaggtcgggataggtacagccctgtacgatggggaacagcgcctggtaatggccgtatttgggcgaggtctggcggtaacggttgaaacaacggtcgagccagcgctcggtcagagcgagcgacttggcggcataatcgcgcggcgagtcgcccggcgggcactcgtcgaaggccatcatgatatcggcgccgatcgtacgctccgtgtcgatcacgctttcgggcgtgaacagatggcgcgaaccgtcgatgtgggactggaaatggcatccctcctccttgagcttgcggcagcccgccagcgagaagacctgaaagccgccgctgtcggtgagcatcggcccgtcccaggtcgagaagcggtgcacgccgcccgcccgctcgagaatatccataccgggacgcagataaaggtgataggtgttggccaggatgatctgggcccgggcttcgtcgcgcacgtcgcggtgaaagatgcccttgacggtcgccgccgtacctacgggcataaagatcggggtcttcaccacgccgtgatcggtctgcaattcgcccgctcgcgcctgcgaagaggggtctttatgttggagcgtaaatttcatagatgtctatataacgtacaaaagtacgtaaaactatttataattcataaaaaatggtcgcaacagtgtgcatcgcggtcatgtcgcggccggtcggtgcggcgggagggaaggatggtgaaaagtcggcgcgaaataacggggccgggaatatacggcggcgactgtcaagggcatctttcaccgcgacgtgcgcgacgaagcccgaatgcggtttgttttatttgattgcaaataaaattgtattttatttggtaatcaacaaagaaatgtttaatttcggatcaggaggaaaacttcttccggccctgttccgggaattttcagcaactctcggaacagggttcgaccgaaaaccctgaaattaatccgttataaaacatttcagacttttttcgctatttttcgggttttggctgttggccggctgtacggctgatccgggcgcggagtcggggcctcccggtgaaaaccctccggctgctgaaaatccgcatgcggtccctgtcgaacaggctctcgaagagttgcaatccgtcctcgaagagatcgacgctccggcggaagatggcgccgccacccgcagcggcggcgtgcggcgtgtgaagagcgtgacgacggtttctcccgaagcgttaagtcccggcggtacccgcagcgaagccacggccgacgtggaggatctgctctacatcgtcaatttcgagaacgaggcgggctatgccattctgggggccgacgaccggttggagccggtctatgcggtcgtcgatgaaggaagcctcacgaccgaagagttccggtatgccgtaacggtcactcccgagcaggccgaagcggacggtgagttggtatttcccctgcaaatggtcgccaggcagcactcggaggcatcggcaccggagggaccggaggtggcggcatcggtggtcctattaccgatataggacatttgggacccactggtggcccgactttgatcggaaccgagccgggcccctggacgaatgaagaatatgttcccaatatgttaaaaacaaaatggggacaatctaatccgtataacattcgggttcccaatggtactgatccaactggttgcacgccggtagccattgcgcaattgctgacttataataaattttactataaccgggccccggacgtaatctcttctgcgacaattcaatgggatttgatcaaacaggcggtacagacaccttccctgcttaaagcgactccgtacaacgatccgacgatttccgtcgcatggctgatccgattgatcggccgcgcgggcggcaccgattatggggctagcggaagtagtaccaaaagatacaaagctgtcaatctcatggaacagtggtatcgaaatgtttacagagaagatgtatctgaaacctatgtccgccggatgatctttgaaagacgcctgcctgcgattattatgggcagaaatacgaatggggatggccactcctgggttgcggacggttggctgtaccgtacgagaatcgtatattcgatatataacgacggcagcaaaaagaaatatatgactcagggccagagattggttcattgtaatttcggatgggaaggaagtcatgacgggtattattatgtcggagcattcaatacggcgaaaagcccggttactctcggggtttcgagtacaggtccaaatgattttagcaacgataacgagataatgatgtatatgttatgagaaaaacgggtttattagccggatttatcgcattgacgcttatagtcggttgtgaatcggatggttgcaaatttacctattcaaaatattatatcgaaaactatgtggacggggatttggttttgttgccgtattacgctgtccggtcttcggcatcggatctgcctgcacccgtttcggaaggattcggagtttccatatatgaaggggtttactatcaaagtccggaattgaaaggtgcgcagcatcccgatgagttcctgcgaattgctgagcgcaacggagatactgaattcaatgacttgaaaagtccccctgaacagggtataatagcatttgcagacaatttcaccggcataaaagttaccagcgacaaagattggagcgccgaatacccggcgggaacatcgctgaacgacaaaatgggggttcggtatgtaagctatgccgaatacatagagagcggttatccgcccgggttcgatcttgggaaagatattctatacgacaaaccgttgtcggccttgcaacccgacgatctgcgggtggtcgaatacactccttcctccttgtcgatttactcgtttatactttattttacgtcggttcccgacaatccgggcgaggtgcacacttttacggtggaattcaccacttcggacggtatggtcaagactgcctcggtcacctgcacgccggaggtcgatcctgcgttgcaataaatagccgacaggaacagcataatataaggtcgaacttcaatacgggctaaaattcttgccgctccagtcctgtttcgcaagaaagacgctctagacaaacgtttgatccattgcaatttcggatggggagggacagccaacgggtattattactacggagctttcgatctgcgcaacggaccggaggccggttatgacggtgaggacacgagttcgtccagcgacaagtattacgatatggaattgatagtcacttacaccaattgtccttaaaaaacgtatgattatgacacgaaaaaacttgatattattgttgttctcactcctgacactgaactcctgcaacaaacatgaaggtccggagttgaggttttgcgagaactacatccaaaactattgtcagggggatttggtattgctgtcccgaagtccggaccgccccccgcaaatcccggcagacccgcaaacccccatacgcaatttttggatagaattgaccgattgcgagtggatttcccccgaaagcgaccctcaggagttcgaacgcctggcgattcgcaacggggacgtcggttataaccgctggctcgagttttgggagtacccctctgcttttgccgataattttcagacaatgcatattaccagcaatgccgactgggatgaagagcatccggcggggacattgctggacgatatcctgtgggccgaattttggtcctacgccgattatatccgtagcggatacgaaacagggggcggcaacaatgtacagatgctcgtcgaggatttgaaagccgacgatatgcagatgatacgtgactatgtgattatctatttcacaaagaccccgaccattgatcccattcacacgctcactgtcgaatggaccaccgtcgagggggaggtcaagaccgcctcgctcacttgccggccgcaggtcaatgcgaaagaataacctgcgtgcagtcacgtacgatttaacaagatagaagagccatgaaaaagagtttattgctattgttgctgccgtttttatgcggatgttcggaaaaggaagagccgatcggaggacctgtcatcggacctacttatttgatagcccgttacgtggaaggagatatgaagctggactatattccccggaccgctgcgacggacggcaaatcgaatacgctttacatagactgggccgacaccgaagagtattataatccggatatggagaaatacaatcttggccggcaagagttctggactcccgaaaacaaggcgaaatatctcgaaatcgcaaaaagaaacggggatgaaatcggtgcgtacgagggcggcacgcctcccggtctgtatttcggcgatcagattgcccttgccgataatttcacttcgatgcatatcacgagcgatgccgactgggatgaggagcatccggccggcaaaccgctcgacgacctgttccgggtatcggtgcggagttggaaacagagggatgaatacggggccccgcttctttgccgcgagaggatggatcggatcgggccggaacatttgcagatgatccctttcaatccgaagaatccgtgggacggccggaagaatttgcggccgatcgaaatcgaaccgcttgccgagcctgcgtcggagcaacatcaccgattgacgctcacgatgaccaccaccgacggacgtacaaaatcgacttcgatcgactatccgccgaaaacgggactatagccgaccttatactgtagcccgatcaatcggaccggcgggaacaggtaacttcaggtaatattaattgctgccgggggttgtctgtatggggaaattatctccgaggaaacttgactgtacctgtcgccgggaacagcggcgcaacgtccgttgcaagcaaaatttcgggacatgaaacagaataatctgatgtcaagtcgtattcagagcacgaaggaaaaggagaacggaaacgatcctcatacaggaatcgtttccgttctttattacatccgccggtcgctatttcttcccggtttcggcgatgatcttccgaagggcggcggtaaactcttcggccggcatggatcctgttatcttgcccagcaggtcgccctcggtattgaatacgaggtaggtcgggatcgaccgtatgccgtgtttgcctgccagggctttcccggtcggtttgtcgatgtcgtacttggccgcgacgaaatattcgtccataaagtcgcccacctcctttttcgagaagacgtcgcgctccatcgccttgcaggggccgcaccaggtggcgtataaatcgatgaaaaccaatttgtcttgagcgatggcctctttgcggaccgcatcggtcgaagagtccaggaaccgtacctgcgcgtcggctgcggcgctgatgcccagcacgagtaaaagggtaaaaagaatttttttcattttcgtattttattaagaataacgaaacgggtgctgctaaaattgtgccgcctcgttctgcgccgtactcaacaggccgcaggccgcttggatatcttcgccgcgagaggtgcggatggtcgtgtgtatgcctttggcggtcagagcatcacggaacgcgatcatggcccggtcgtcgggggagaaatagggcgatccgggaattttatggaaacggatcaggttgatccggcacttgatgccgtccagcaggcggcatagctcgcggatgtgacgcggagagtcgttcaggccgctcatgacgatgtattcgaacgatacccgccgctggtgcgtgaaatcgtatcggcgcaggatttccacgacttcgcggatcggccatgccttctctacgggcatgatttcggcccgttcgtgcggaaaggggttgtgcaggctcacggccaaatgcacctgggtcgcctccagaaatcgttcgagtcgggaggctacaccggcggtcgaaaccgtgattcgtgtgggcgaccagccgaatccccacgccgaagtgaggacttcgagcgccggcagcagattgtccaggttgtcgagcggttcgcccatgcccatgaaaacgacgttggtgagccgttcccgttcgggcagcgacccgatctggttgaggatttcgttcgtcgaaagggagtgctggagcccctgtcgtccggttgcgcagaaacggcagcccatacggcagcccgcctgcgacgagatgcagagcgtcgcccggtcgccgtcggggatgtaggccgattcgatgaaatggttctgcgaggtacgatagaggtattttttcgtgccgtcggtcgaaatgctgactttttcgggagcggtgagtccgacttcgtacgtttcggcgagcagggcccggtgccgggcggatagatcgctcatcgcctcgatcgtcgtcgcgtgcttgtcgtaaagccaacgtgcgatctgtttcgccgcgaaacggggcatctccaaccgattgcagagggcttccagttgggacagtgtttgtccgtaaagatattcgtatcggggcatgggagacggtcgtgagggaattttcggggcaaaattagtcaaaaattaagatttttcggagcgaaagtactgtttttgattttttatctctatatttgtcggtagttagtgtgccttcgggtcacttgaaaggataacaataaacaggaacaataatggaaattaagaaatcaccgaaagccgacctggagaacaaacggggtcttttccttgaaatcggtttggtcgtggcgttggtacttgttattggtgcattcgccgtgactccgaaggaacatcgtatcgagaaagtcgatcttggctatgctcccgtcgaagtggaaattgtcgaggttacccgcgaggaccagaagccgcccgaagctcccaagaaagtcgatatggccgtcgtgagcgacatgctggaagtcgtaaccaacgataccaagatcgaaacggagatcgattttgcggagtttgatatgaaccaggcgatcgaagtggctcccgtccagaccgaggaggttttcgaagaggagattttcatcgtcgtggaggagaaagcgtctttcatgggcggcgacgaaggtactttccgcaactgggtgcagcagcgtgtgaaataccccgcgatcgctcaggaaaacggtatccaggggaaggtaatcatctcgttcgtggtgaatacggacggttccgtatccaatatcgaagtgttgagaactcccgaccgtactttgtcggacgaggccgtacgtattatcaaatcttctccgaagtggaccgcagccaagcagcgtaacaagtcggtccgtcagaaattcgtcattccgatcgatttccgtatttcggattaaggtttgcttgaaacatttggtaagggtatcctgcgtaaagatggggtacccttattttcaccgtgcaggaggatgcgtcttttcgaagatgcgtgtccgtgcgtaaattgcatgatggattggaacagaataaagagattgtaacgaagaacgaccaacccgcttccggggccgggttcgagcgggccgtattggtcgcggtcatccgggaccaacaggatccgcgtcaggcggaagagtacctcgccgaattggaatttttggccgaaaccgccggaatcgtgggtgtccgccggtttacgcagcgccttccgcagccgtcggcccgtatttatgtcggtccggggaaactggaggagatcgctgcctattgcaaggaggaggagatcgacgtggcgattttcgacgacgaactctctccgtcgcagacgcgcaacatcgaggcggccatgccctgccggattctcgaccgcacgcgtctgattctcgatattttcatgtcgcgggcgcagacggcctatgccaagacccaagtgcagttggccaattaccagtatatgctcccgcgtctgtcgggtatgtggacacacctggagcggcagcggggtggcacgggaacgcgcggcggtgccggcgaacgcgagatcgagaccgaccggcgaatcatccgcaaccgcatcagcaagctcaaggaggatttgcagaaaatcgaccgccagatggctgtccagcgatcgaatcggggttcgatggtccgtgtggcgctggtgggttataccaacgtcggcaaatcgaccctgatgaacctgatttcgaaaagcgaggtgttcgccgagaacaaactcttcgccacgctcgatacgacggtgcgaaaggtggttttcgataacctgcctttcttgctgtcggataccgtgggtttcatccgcaaactgccgaccgaactgatcgagtcgttcaaatcgaccctcgacgaggtgcgtgaagccgacctgttgctgcacgtggtcgatatttcgcatccgcagttcgaggaccagatcgccgtggtgaagcagacgttacaggatatcggtgccggggataaaccggtttatctggttttcaacaaggtggacgcctatacttatgtagagaaggagcctgacgatctgacgccttccacgcgtgaaaatcgttcgctcgaagacctgaaacagagctggatcgcccgggccaatacgccctgcatctttatttcggcggtcgaaaaaatcaacatcgagaagctgcgttcggatctgtacggcatggtccgtgaaatccattcgggccgctatccgttcaacaacttcctctattgacctgaaatgaaagttaaataaatacaaccttatgttgcacattctcaacagtcagaacaccgttctcaacaagtttgtcgccgaaatccgcgacaagtcgatccagaaggattcgatgcgtttccgccgtaatctggagcgtatcggagaggtcatggcctatgaaatatcgaaaacgttcgagtatgcggtgaaggtggtcgaaactccgctgggcgaggcttcggtagcgatgatctccgaccaggtcgtgatcgctacgatcctccgggcgggacttccctttcatcagggattcctgaactacttcgacgatgcgcagaacgctttcgtttcggcttatcgcaagagtaccaaggacggtaagtttaccgtcaaggtcgaatacatctcgtgtggcgagctggagggaaagactttgctgctggtcgatcccatgctggctaccggttcttccctcgtgctggcttacaatgctttgtgcgaacggggcgggcagcccgcgcatacccatgtcgcggcggttatcgccagcgaacagggggtcgaatatgtggagaagaatatgcccaagcgtacgaccacgatctggtgtgctgcggtggacgaggaattgacttcgcgggcttatatcgtgccgggtatcggcgatgcgggcgatctggcttatggtgagaagatctgacgtgcgacgcctgttgtttctgggggccgttttctgtacgacagtaggttggatgctgttgcagaagccggctttcctgcttttctaccatgcccgggcagcagaggcctctttcggggagtggctcggagttctttggcatggactctcactcgattgcacggtggcgggttacgtcaccgcttttccggtacttgtcgtgctggcatcgttctggattcccctttcgcagcgggtgtggcggatcgttctgacggtctatttttcgctgatcgcactggtgacggccgcgatcttcgccgtcgatctcaacctgtacggctattggggctttcggctcgacggttcggtgctgatctacctttccgatcctggggaggcgcttgcgagtgccagttggggcgaagttctgcggcagattttaatcatgctggtctatgccggggcgatgatctggagttaccggtggattttacggcttttccgggtcgaacccgttcccctgcggggccgggtcgtcccaacggttgcggcgctgctgatcggcggcttgacttttctggcgatccggggtggcgtgacggtcgccacggcgaatgtcagcaaggtctatttcagctcgaacatgttcctgaaccacgctgcgacgaaccccgttttttcgtttctctcctcggtcggggacaatgagaactatgccgaggcttatccgttcttcgaagaggagcggcggaagactcttttcgaagagttgcggggcaaccgtcccggggccgatgccggtacgccccgactactgcgcagcgaccggccgaacgtcgtactgatcctgctggagagcttcggccgaacgatcatggacgaaacggtgaacggcgagcctgtgatgcccaacatgcagcgtttcaagcgggagggtgtctggttcgaaaacttcttcgccaattcgtttcgtaccgaccggggacaggtggccgtcctgtgcggatttccggcccaaacgaccatgtcgatcatgaagctgccgcgaaaaagcgccacgctgccttcgctggcccgttctctcggccgggaaggttatcgttcggcattcatgtacggcggcgacctgaacttcaccaaccaggcttcgttcatgtattcgaccggctgggagaagctgatctggcagaaggatatgcagctcgatgccccgacttcgaaatggggctatgccgacgacgtggtggtcgatcttttcggggacgaggtggaagcgctgggcagagaggaacaaccgtttctggcgggtctgctgaccctttcgagccatgagccgttcgaggtgccgttcgcaaaattcgatgacaagctgttgaatgccatggccttctccgatgcacagatcggacgtctgatcgaccggctgcgggagtcgcccgtgtgggacaatttattagtggtgctggtcgccgatcacggctacccctatccgtacgatctggcctacaacgctccgctgcgacaccggattccgatgatttggctcggaggcgcacttgcgaccgcctcccgaacagtagatacgtatgcctcgcaaatcgacatttgcgctacgcttctggcgcagatgggccttccgcacgacgaattcgattacagcaagaatattttcggagcgactccgccccataagtttggttactactgtttcagcgacgggttcggcgtgatcgacgccgacggcgaaacggtctatgacaatacgggcgaaacggtgctttctcaaaccggcccgcagtccgaaaggttggagtggggcaaggcgatgttgcagaccacttacgaagatatcgggcggcgctgatccgaagggatcggtacggaaaaggtcatcgcgggaacgatgaccttttttcgtgggtggaaacaggcttatttatcgcttttgggcattagggagcgggcttccagaaatgcgtaaaaagcctccttgtagccgtctgaaacggggatgtacgttttgccgaagacgatccggccccgctcgatgattcggattttggagggttggacgatgtaggagcggtgtacccggacgaaacgttcggcgggtagttgttcttccaacgtcttgaggcttatgagcgacagcacggggcggggttcgtcttcgacgtaaatctttacgtagtccttgagtccttcgatgtagaggattttatctaattcgatctgccgaagccggtattcggtcttgacgaagatgcttccgggcccagcttctgcaggcgatggtttgccgacgctgcggcgcttgagttcgaaccattcgaaggctttgttggcggccgtcaggaagtcggcatagctgatcggcttgagcaggtagtccaccgcacccacgcggaatccttcgacggcgtatcggtcgaaagccgtcgtgaagacgacccgggtccgggtcgggagcatccgcgagagctccatgccgctgagttccggcatctggatatcgcagaaaagcaggtccaccggttcggttttcagggcctcgagtgccgtgatgcctccgttgtaagctcccttcaattccagaaagggggttttccgcacgtagctttcgagcagttcgaccgccagcggctcgtcgtcgataatggcgcaggtcagtttcatcggtcggtcaggttaatgcggagcagggtttcgtacgtgtcgccgtgttgtccgtatttcatttcgtaacgcccgggatagatcatttcgagccgccggcaaaggttcgcaagcccgatgcccgagccgctgcggtcggcctccgatttggggaagaagctgttctcgatccggcaggcgagtactccttcctcttcccggatgtcgatgtcgatgaacgaagggcggtcgttgcttacgccgtgcttgaaagcgttttcgaccagcgagatgaagagcagcggcgccacgagggtatgcgacggattttcgggcagcgaaacatcgagccgcacatggcgcggcaggcggatgcgcatcagctcgatgtaattgcccaggaagtccatttcggccttgagaggtaccgtcggccggctgctgtcgtagagtacgtaccgcagcaggcggctcaggtcgtgcaccgtttgctgggcccggtcgggatcgagctggatgagcgaatagatgttgttgagcgtgttgaataggaaatgggggttgagctggctcttgaggttttgcagctccgcttcggagcggctgcgctccaagtccttgcggatgttttcggcccggtaccactgtcccgtcatccggatggcgacgctcactccgactaccagcaggtagagcatggcattgcgcaggaagaagaacatcgtatcctgccacggacgctccatcggcggatggtgggggcgcggcggtattccgaagcggaagaaaaggtgtacgagtagcatgactccggccacgagcagcgcattagcgagcaggaatcgccccacatgccgcgtgaaaaggtagcggtcgatcagcaggaggtagttcacgtaaaatactgccatgaaggagaggggaaccaccagaaaccgcacgtattcctgcatgttcataacgggttcgcggccgcccggtacgaagaggggaaggccgaaaaccacgctccaggccgccaggtggagccagaagcccgtatgtctggattgcagggatgtcatcctgttgcaaatataggaattatccgggtatttcatgcttctttttctgtatggcgacggctgtttcggattcggccggttttccgaaaaaatagggtcggtatcttatcctgaaaagcggttattcgtagcgcagtgcgtcgatggggttgagcatcgcggctttctgggccgggtaccatccgaagaagatgcccgtaagggtgcagacggcgaacgaaaggaaaacgctccagggctggatatagatcgggaatgccgcgaagatattgacgagtacggcggcgcccacgccgacgaggatgccgatcacgccgcccgtgacgctgatcaggatcgattcgatcaggaactgcgccagaatatcgcgccctttggctccgatactcatgcgcaggccgatttcccgggtgcgttcggtcaccgagacatacatgatgttcatgatgccgatgccgcccacgagcagcgaaatgcccgccacggccgccagcagcagggtcatcatgtcggtcgtcgaagtgagcatcgacgaaagctcctgctgggagcggatcgtgaagtcgtcttcgtcggtcgccttgagcttgtggttggtccgcaggatttgcgtgatctcctcgatggcctggtcggtatattcttcgctcaatgccgagcaggtgatcgattgcaggtgggtgatggcgaggattcgcttctgaactgtggtgtagggggccagaatcaggtcgtcctggtccatacccatactgttataacccttgctctcgagtacgccgacgatgcgtagcggaatctttccgaaacggatcactttgcccacaggactttctccgtccggaaaaagctcgtccacgaccgatttgcccaccagacataccttggcggcggtcttgacgtcctgttccgagaagatgtccccgtcctcgactttgtagcgccgaatgtccaggtattcggggctgataccgtaaacggtcgtcggcgtgttgttggcaccgaagatggcctgcccggaactgttgaccgaaggcgaaatgtagctgatatagcgcgcctgcgcctgaatgtcttccaagtccttgagcttgagcgactccatgtccgccgcgtcgagccgcacaccgccccgccggtcgccgccgggatggatcatgatcatgttcgatcccatttcgctgatctgggcctgaatgctccgtttggatccctgtccgatcgccagcatcgtgattaccgaccccacgccgatgatgatgcccagcatggtgaggaatccgcgcagtttgttgttgctgagtgctttgaaggctattttgaaaagattcgtgaggttcatggtctgctcgtgtttccgtgctcgggttcggatggatggtttgttttagtcgtcggttgcgggcagtttcgccagagcttcggcagcgctcaggatctcttcgttgcggacgtcgcttatgatgtgtccgtcgcgcagggttacgttgcggctgctgtaacgggcgatttcggggttgtgcgttacgaagatgatcgtgcggccctgggcgtggagctgctggaagagcaccagcacttcgaagctggtgcgggtgtcgaggttgcccgtcgcttcgtccgcgaggatgacggcggggtcgttgaccagtgcccgcgcgatcgccacgcgttgcatctggccgcccgacatctggttgctcttatgcagcatgcggtcgcccagaccgacgttgcgaagcgcctgttcggctcgttcccgtcgctgcgcggccgagtaggtcgagttgtacatgagcggcagttcgacgttctccagcgccgtagttttggccagcagattgtagttctggaagacgaaaccgatcttgcggttgcgcagtgtggcacgggcgttcttgtccatcgagcgcacggcgattccgtccaggtagtattcgcccgaggtaggcgtgtcgaggcagccgagcgtgttcagcagcgtcgattttcccgatcccgaggtgcccatgatcgtcacgaactctccttcggtgatcgtcagcgaaattccgcgcagtgcgtgcaccacctcgtcgccgacgacgaaatcccgtcgtatgttgtccaatcggatgacctctttcatcgtcgttcgctattttttcttgtcgttgcttcccggaggtcccggcatgaaggggctgcgctcgatggcggcagtctcctcgcggggcttggccgttaccagtccggtaacgatctcctcgctgcccgtgagcccttcggtgatttcggtcatgtcgccgctggcagcgcctgcatatacccggcgggggcggagcgtcgttccctccttcacccacagttccctgcttcccggagccgcctgactgtccgtttcgactgcggtcaatccgatctctcccaacagttccgcattgggaacgaagcgcagggctttggtcgggacggctgttgcgtcgtctttttcgagcgtgaagatcgtcacgttggccgtaagtcccggtttgagtttcaggtcgggattcggagcgtcgatgaccacttcgtaggtgaccacgttcgattcggtcgtggcttcgagccgtacctggaggaccgtcccctcgaacgtgtcgtccggataggcatctacggagaactgtacccgctggccgtcggcgacctggccgatgtcggcttcgtccacatcggccacgacctgcatctgtgtcaagtcgttggcgatggtgaagagcgtcggggtttcgaatccggcagccaccgtctggccctcttcgacggcacggctgatgaccacgccgtcgatcggcgaggtgatggtcgcataacccaggttgcgctttaccttgaccattgccgcctggctctgctcgtaggcgttgcgggccgtttcgtagaggtaaaaagcctggtcgtactctgcatcgctcaccagttgtttttcatgcagggtcttggtgcgggcgtagttcttggtctggtattcgtattcggttttgctgctggcgagttgtgcctgagccgattcgagttcggcctgtagggtcaccttgtccatttcggcgatcagttgtccggctttcacctggtcgttgtagtcggcatagagtttgtcgatgatacccgatacctgcgtaccgacctcgacctgcgtgaccggttcgaccgttccggtcgccgtcaccgagttgcggatggtgatgtgacttacgggagccgtttcgagccggatttgcgccccttttgaggggcgtgcgatcagccagatgcagatgcctgccgctgccactcctgccgctatgagcagatttcgttttttcatggtcttcggttgttgttttattcgaggcaggtttcgcatgcgatgaaacccgacaggtttgattagtaaatgtcgcttgccgagagtccctgataaatattgagcagttcgatactcaacagggtgaggtatttggcttgcaggacctgttgctgtgccgccgaatattcattctgggcggtgatcagttcgacggtattttttaccccgacgcggaactgttcgctggtgagttcatagctttcccgggcgtatttctccttttctcgggcagaaaggtactgggcctgggccgaggtagcatccaggtaggccgattccacatcccgcagcagctctttttgcagcgaagtccactccaggtaactgttatcgacggcgattttcgctttgttgacggccgtgcggttcttgcggttcgagaagatcggaatactgagcgtgagtcctatgttttcgttgaagcggttccatatctggctgccgctttcgaagtcgttattcgacatgtgtcccgttcctatgctggcggacagggatatggaaggatagaatccggcacgtgcacttttttcctccagcttcgccgcctcgacgcccaactctcccctacggatctgaggcatgactttcagagccgttgcgtatacctcgtctttggacggcagagccttcagcacgttctcttctttaacccctggcacggccggattcatctcttccataatatctaattcaagcagttgcttgagttgcagcttgtagttgtcgagtgtcgaactggccacgacgacctggtattcgtcgctcgaatactggctttggagctgggcgaaatctacgcggctgatcgagcccgtgcgcagcatctcttcggcccggtcgcgctgggccttcgaggcttcggccgtgctgcggttgattcgcacggcgtcggcggcgtaaaggcactgcatgtaagcctgtacgatggcgatgcggatgtcgttcacggattcctcgaccgagagagcatccatttgattctggactttctgcctcttgacttccgtacggagcttgccaccttcgaagatcgtcattcccgccgttatgccgtaggtccccgtataactgttgttgtccgtgacttcggacgaagggtagttcgtgtaactttgcgtggtcgatgccaccagcgacggaaagagggcggctttcgcctgtttggtatcctcgatgcccgaaagttggttgttgcggctttgccgtacctggatgttgttctggtaagcgtagtccagacactcctgcaaggtccatgttttggacgcttcctgtgcggttgcattccgtagccccgacagaagaagggagcaaagcagtatcggcaggagtcgtttcatggttttggttttgacgcaaaactaacgacggctttccgtgcgtgcaattgaaatagacgaagaggggaattttatcgacgaacggccggtttcgggaaataaccggaataacgaaccctgcgatccgctcggatttcgggatgcagggtcggatacgaaaaagtccgccgacctttattagggtacggggtcgtatccgctgccgccccagggatggcagcgcgaaagtcttttgagcgtaagccacgttcctttcaggggaccgtacttgcgcagcgcttcgagcgcgtattgggaacaggtcggcgtgtagcggcacgaagcgggagtgaagggcgatatgcagcgttgatagaactttaccagcacgatcagcggcagcgtgcagacccgcctaaagcctcgccataatttgttccatgattttctgtacggcatgttctatgacccggtagggggtgagctctttggatgaatagatcagggcgagatccagtgcgacgggatttccctcccggtcgaagatctctttgttgagccggtaagcctccttcatacgacgacgctgcagattgcgcttgttggcccgtttctgaaacttcttgggaaccgaaaagagtacttcgaccgaaggaatttcgtccgcttcggcgatccagacgtagcgcagcggatagacgaatccgctctccccgctttcgaacaggcggcggatggccccgaacgaacgaagcctttcctgacggggaagcgaacggtctgtcatagctgaaacaggtaactgtatgcggttttaatgccgttttcggtcggtgtcggcgaaatcgcgacggaaatagcgtcgtccgcttcttgtttgccggatggaatccttcggaatcgcactttgaaccggtgatggtcgcacggagccgttccgttatttcttctccgccggagtcgtgcgccgggtacggcttttcttggctaacttatgctgttgggttcggatgaactcctctttgtcggcgtcgtgcgtgacggcgacatcttcgatctgttcgcctttcgccagtttcgtgaggtaaatatcgacggctttggccatcgaagggaccgtaggggtcggagccatggctttgaccttgatgccggcatcgaccgcagcacgcagcgtgccttcgccgaaagtggcgactgcgggcagctcctcggcggggaagcgttcgagaatggccttgacgtccgatggcgaatagagggccagcagatcgaatttcttgatgtccaaatcgttcaggtcggcggcgactgtgcgggccagaatcaccggagagaactgtaatttcaacttggcgagcgtttccggcagttcgggtttatggggttcgctcaatgccagcatgaatttttcttccttgtgctttattatcagctcgatgaagttggtgaaactgccgtcggcgaaagaaattttgcgtttgcgatatacgatgtatttttgcaggtagagcgctacggcttccgtctggcagatgtatttcatggtttcgggaaccgtaatccgggcctcttcgcaaatgtggaaaaaactatcgactgtcgtgcgcgaagtgaagatgacggccgtatgagccagtatttcaacacgctggcttcggaattccttgagcgatacccctactacgcggatgaacggcatatattcgatttcagccttgtgtttctgggataattcgtagaaaggagatttttcgaccacggccggacggggctgtgaaaccaatactctatgggctttcaaattcagaacggttttatcgggttatcaaattcttgtcagcgagagccacacgaagctcacgggaaaaatttcgacggcacaaaggtacaaaaaccaatgcaaaatcgaaatttttttcgagagaaagagcatgagcgactctttcaggtagagcaacagcagtgctccgccgaggatgaggatgccgaaagagaggatatgcccggtgtcgggcgaagccagcaggaagagcaggatcaacgggcacagaaagacgacagaaagtgctaaatagttgaattttagcgctacaagctgatctgtgatcggtcgggagagggtgatgtagcctgtgatccggagcagccctacctggaaaagcagaagaacggccaatccgactgtggcgaggaggcccagtaccgggatccaggcttcggggacgacctcggggatggggaaccaacggtccgtcagtctcagggtcagtagagccagcatgggaagtcctattccgatggccgcccacaggaaccgggtataggtgctgccctgcgtgtcggtcatgcgtcccggcttcgaccggtcgagactcaatttccgacagaggatataaacttcccgcaggttatggtagatgatgaccagataagcgaaaaccagggccagtacgatcccttggaaaggggccgattcgtatatgggacggacggattgcgccggaaacggttcgatcgcgagtgtcgaaccggctccgaacagctcttcggccgtgacggggggtgtcgcctgcagggtgtcggggggaatcgtcgccagcgaatcccgcagccggaagatggattcccgaagggccgtttcggttgtcggcaggctgtcggacagttgccctgccagcgaatccgtgcgtatttcgggttgcagggccatcagtcgaagtagcgtttaagggtgatgcggatgtcggtgcctttgcccagttcggagtaaacgacaccgatccggccctggtgatactcttcgatcacgcggcgggaaagggagagtccgaggccccatccccgggttttggtcgtgaaacccggttcgaagattcgtttccagttgcttttgggaatccccttgccggtatccttgatgtcgatcatcacgtatttttcgtccgaggagatctccacatcgatccgtccgtgcccctggagggcgtcgagcgaatttttgatcaggttctccacgacccattcgaacagggcggcgttgatctgggccttgaccggagcgatggccaggccgttgtagtcgatggtgacgttgcggggtgcccgggtccggaagtacatgaccgatccgcttaccacttcgttgatgttctccggggtgagcggggtttccgatccgattttcgagaagcggtccacgatcttcatcaggtggctcaagtccttgttcatctcttcgacggcaccctgatcgacgggctgcgtgcgcaggtattcgatccatcccagcagcgaggaggtgggggtacccagttggtgcgccgtttctttggccagtccgatccatacgcggttctgctcgtcctgcttggtcgagcggaaagcgatgaaacccagcaggatgaagatcgcaatgacggagagctggatgtaggggaaccagtagagggtcttgagcagccgggactggccgaagaatatgatgtgtttgtggtctttgccccagtagtattggatcgtgatcggggtattctcttcggtgagctggttgatcttcttgcgcaggcggtcgggatggttgatgatctcttcgggaatgagatgcgagtgcaataccttcaggttctgattggtgatgatgaaggggatgttgttgcgctgactcaggatgtcttggacgaaggggtcgttgctcgagtcgctcatcacgcgctccatggcgtgtacccagagggccacttcgtgctgttccttctcccgcaggcggcgggccatgtcgttggtgaacagcagggacagcgtcaccatcgtcactccgacgacgatggctacgatccgcttgcggaacgagagtattttgcgccccagtttgagcataagccggttatttcttttcggacgtctgcacggtcgtgatttcttggtattccgtcggattttccaacacctcggtagcccggagaacctcggtgtcgtcacccaggttatgttcgatcacgccggcctgatagctgtgacgcagaacgatgtcgttgttgatcgtttcggcgatctctttccgataggtatgcagattggtctgcgtgtcgtctttcaggtcgccctcaatcgctgtgatttcctgggccaggtcgctgtaaaggtcgttttcggccgcttccttcaggaccttgagcacccggcgggtttccgattcgtaggggacttccttgccttccataaatttgacgaaggcgtcgtagtccgcatcggtgatcgagaacgtgcggttgtcgatcgtgtcggtgtggtgttcctgcatgtattcgtccacgaaatcctcgatgaatcccatagccagcagagtaacggcgaaacggctgatgtactgaggctcggtggctatgtcgggcgaaatgccgccgccgtcatagactttgcggccgccgcgggtcgtaaattcccgtacgagcgaatcggctaccttgccgaccgtgccgtcctgcttgcgcgaggagtagtcgatggcctggatacagcgccccgagggaatgtagtatttggcggtcgtgagtttcagcagggtattgtatcccagcggacgggtcgtctgcacgaggccctttccgaagctcttctgtccgatcagtacggcccggtcgagatcctggagcgagccggcgacgatctcggccgccgaagccgaattgccgttgatcagcacggccaacggcagatcgggcaggatcggatcgttcgcggtgcggaagacattctcctgcgtagcggcccgtcctttggtgcggaccacctccgtacctttgggaacgaacatagaaacgatcttgacggcttcctgcagaatgccgcctccgttgccccggtagtcgaggatcaatccccgcagggtatcctgtgtgcggagtttctcgatcgcggtgcgcatctcttcgtacgatccttcggtgaagtcgctgtgctggatatatccgatcccttttgcgacgaacccggcgtaggggacgctgggaatggctacccgttcgcgcgtcagagtgagagtgtcgtgcccgccgccgatcaaccgttcgatgacgattcggacggtggtgttgggcgtgcctttcagggcggaacttatctgtgcggggtcccaacccttggtgtcctcgccttcgatcgagaggatcttgtcgccgatgcggatgccggctcggtcggccggggagccttcgtagggctgtgcgaaaattacgtaatcgcctttcttgcggatcatcgaaccgatgcctccgtacttgcccgtggtgagcaggtcgaagttcgacatctgctcttcgggcagaaattcggtgtaggggtcgaggttgcgagtcatgccttcggcggcatcctgcatcagttggtcgggatcgacttcatcgacgtagaagagcgaaagctcccgcatcatattgaccagtagctccatgtttcggcccagcccgaaatcgttgggcttgccgaaccagaagagcgtgcaaagcagggcgaggaccgcaggaatcgccgcgcggcgaagtatgggacgtttcttattcattttcattgcgtgttctttcgagataggactgcaggcggtaataaacccgggctacgccccggcgaataccttcgatcgtgatccattccccggtctgggtgactcggatttcatcttcgaaaaggagcgtgagccgcttgaagagggagtctgcccggaacaccatttcgtgttcggattcccggaccggcttgaagccctccgaaacgaaggcattgaggatctgctcgcggttcttgcgcaggctgccgatctcctgccggcggatgaagccgaacttgggatacagggccgaaagaagcaccaccgcgacgatcagcacctgtccgcgtgtggagtggacgagggccgagaaggtttccgaaggggtcagcaccgaggtattcgtgagcagcatcagcgccatgataatcagatatagaacgcagagcgcgataaaatattttacggaacggatcaggtacttcatggtcgttatcgtttttataaggttgaatttcttgtctgtttccgatacggaggcacgtgccggcgttttgcgtccgtatttcggattttttgtttcaccgcccttgcccggcgaccgcatcggccacttcctgcatcagccacttgggggtggacgtagcgccgcagataccgacggattcggctccttcgaaccattcgggacgcagctccgaagcctcttcgacgttatagctgcggggattggcccggcgacacacttcgaaaaggaccctgccgttgctcgacttgcggccgcagacgaagataattacgtcgaatcgccctgcgaactcctcgaggtgactttcgcgattggatacctggcggcagatcgtgtcgtgggcgaagacctgcgcagggtcggtggcccggctgcgcatccggtcgcacaggtgctggaacagggagatgctttgcgtggtctgcgaaaggaaatagatcggacgtgtgaagtcgatctggtcaaggtcttcctctgtttcgacgaccagcgtgggggcttcgacctgcccggtgagcccgatcacttcggcatgtccccgcttgccgagtattactacctgtcctccgacctgccgcatcttttcgtgcgcctcgacgacgcgccgctggagtttggccacgaccggacaggtcgcgtcgatcagctcgatgcccagctcttccgccagccggtaggtcgaaggaggttctccatgcgcccggatgaagagactccgccctttcagtcccggcatctgatcgtgggtcaccgtgtgcatgccgagccgctcgaggcgctgcacttcgacgcggttgtgtacgatatccccgagcgagaagacctcgccctgttcttgcagagcctcttccgcccgggagatcgctctcacgactccgaagcaaaaaccggaatggctgtcgatttcgactctcatcgccgaggttgttcgttattgtattttatgcggtgcggtcatcggccgcaagctatcctatcgaaacgctccatgaaccaggtcatttgctcttcgacggtcatgtggctgttgtccagcactacggcgtcgtcggcctggcgcagcggcgagatcgcgcgtgtcatgtcggccttgtcgcgtgcgacgatgttggcccggatctcctcgagcgatacggagtcgcctttggccagcagttcgtcgtagcggcgccgggccctgacttcgggatccgccgtcatgaagattttcatttcggcattggggaataccaccgtgccgatgtcgcgtccgtccatgaccacgccccgctggcgacccatcgcctgctgcatggccacgagtttttcgcgtacctggcggatcgagctgacgcggctcacgcagttgctcacttcgatcgtgcggatgcgtccctccgcccggtcgccattgacgtagatgtcgctcgcgccccgttcggggttgaagcgaaagtcgatcgagatgtcgtcgagcagggcgatcaccttctcttcgtccacgatgcccgaaacgatggcgccgtgttcgagcgcatagagcgttacggcgcggtacatggcccccgtgtcgatgaagatatatcccagcttggctgcgatggttttggcgaaggtgcttttgccgcacgaggagaatccgtcgatggctatgatgatctttttaggcttggagcattccatgggggatgaggttgaagaaggtggataaaatcgtatagacgccgagtactccgataataatgccggccacatggttgatcgtgagcatgtggcgggggcggaagcggcgccggaaaaggttgatcaggaaagccagggaggtccaccagaggatagcgcctccgaagaatcctacgatgacgagaaatccccgtcccaagccggcgacgtcgaaggtttcgatcgtcgaaattttgaaaactgcgaagaaagtcaggatatagggaatgaccagcacgaaattggcgatcgtaaggccgaaaatcgaagcgaagtcctgcgtaaggctggtcttgccggcccggttgcggcggatctgcggtaccgggttctgaaagaagatatagacgcctacgatgactacgaagatgccggcgaccacacgcagcaactggttgtactggtcgatttgagcctggagcatcgagtagcagaagtaagcgatcatcgccatcagcgtatcggcagcggctacaccgagccccgacacgatacccgagcggcggcttttgctgagggtccgctggatgcacagaacggccaccggtcctaccgtgatcgacgcggcgacgccgacgcagaatccgcgcagcaaaatctcgatgatttccagatacatgctctttcttgcaggttttcttcgcaaagatacgaaaactaacttaaaattcggcccggtttcggaaaaagggcggaaaagagggtcgaaaggagaatcgttgttctataatgttgataagttctccataactttgccttctcgggtcgggagagggatcaaaaaatggataattttgtccatacacgctaaaaattcaatactatggcagagaatcaaaaaatggagatagatctgggcgaggatgtagctcagggtaattacatcaatctggcgatcatcgcgcattcggtttcggaatttatcatcgactttgcgacggtccttcccggtgtgccgaaggccaaagtcaagagtcgtgtgatcctgactccggaacatgccaagcgcctgctgctctccctgcaggagaacattacccgctatgaaagcaatgtggggaaaatcgaaataccggctccgcagcgccattctcccggcgattttccgctgggcggaggtcccaagatcggagaggcttaaagtccggtatttccggtcggctggtgcgggacgggcggttgttttgccgaagccgtgaaacaagagaaggccggccgggaagaggcggacgaaggcgcgacagtttttgcagctgggtcggcagtgccggccacgattgaaaagccggaaggaaatatttccttccggcttttaggtaatggctttcgccaaaggtgatttagggtttattcgagcacttcggcgacgacgaaattgctgcctccgatgaagatcatgtcctcctccgaggccatttcccgtgcccgggccaatgccccgctcaccgtgtcggccacttcgccccgaagaccgtatgcagccgctttttcagccagcttgccggccggaagcgcccgttcgttgccgggctgcgtgaagatataacgggcctctttgggaaacagaggcagtacgctcgagaggtctttgtcattgacgaatcccagtacgcagtagaggtcgcggtggggggttgcggccaactgttccgcaacgtagcggatgccgtgggcgttgtgtcccgtatcgcagatcgtgagaggtttgtcgccgagcttctgccaccggccttgcagggccgtgcccgaagcgacggtgcgcatgccttccgtgagcgcgcgcaggctgatcgtcagcggggtttcctggtgcagcaggtcgatgacggcgattgccgtcagtatgttgtgtacctggtaattgcccgtaaggtccagttccaggttgaaaactttgttgtcgcggtggcgctggatgctgaatttctggaaatccccttccgtcgaatggttgatgcacgcgaaatcgttttcggcatagacgattttggacatcatggccgttgccgcctggtcgaagacgtggttgtattcgtcgctcttctcgccgatcacgaccgggatgctttttttgatgattcccgctttctcggctgcgattttgggaagcgtgtcgcccaacagggccatgtggtcgagtccgatgttggtgatgacgctcacgatcgggatgatgaggttggtggcgtccaaccgtccgcccagtcccgtttcgatgacggcgacctcgacgtcgctttggtcgaagtagtcgaaggcgagggccgtggacatctcgaagaacgagagtccgagctccttcatgcagtcgtagtgtttgtccacgaagttcacgactttctgcttggggatcatctctccgtccacgaggatccgttcgcggaaatcgcgcaggtgaggcgaggtgtagagccccgtgcggtagcccgcctgctggagtaccgaggcgagcatgtgcgacacggagcctttgccgttggtgccggccacgtggatcgtgaaatagttgcgctggggattgcccaggtgcttgcagaatgcggtgatgcgttccagtccgggtttataggcttcgggccccttctcctggtacgaaacgagcgatgaaaataggaattcgagcgtttggttgtaattcataatgcaaaagttccggccccctccggatttatgcgggtcttgttagcggtcgtatgtctgttccggttacttcaccagatggtttttcttcttgatccgataggcgatgtaatagaggatacagagtcccatgaggagctccgaaattcgtcccaggtagtcgccgtatcgggtgtaaaaagtcagttcgctgttgagttcgacctctccggtgaggatgccgcgacggtcccagcccagcttttgctgcacgtccccgcgcgtgtcgatgaatcccgaagtgccggtgttggcgctgcgggcgatggcccggcggtgttcgacggcccgcaggcgggccatcgagaagaggtgtttgtgaccggatgtgtcgccccaccagccgtcgttcgacgagatcagcagggctctggctccctcgcgtacgaatccgccgtagaagttgccgtagagcccttcgtagcagatcggggttcccacgctcacgccgttatgaacgaatgccggacccggttcccccacgccgagttgccccaccgtgccgcccaggtcgatcaccaggaatttgagggccttgaagatccaggtcggagtgctttcgacgccgattaccagccggcccttgtggtggatcgggaggcaggcggtcgtgtcgatgccgagcgtcgagttgaatttgtcgtaaaaagctccccgttcgttttgacgggcggtttccgtccgttcctccggcggataatagacgatggtttcggctcctgtgacgatcatcgcaccggaagatttttcgcgcaggatctctcttattttcgtaacgaccggagcctgcggcagatagcgctcgtcgtaggcgtagggccagaccgtttcgggcagtacgatgaagtcggagcctgcgggagcctcttcgatcatcgagagcagcagtctttcctgcatctgctccgttcccgcagcgaatttgtcgtaacagtcgatgttgggctgcactacggataccgtgaccgagccttcatcgggtgcttcgtaactccagaaaatgcccagcgaaacgagaatcggaaggagtacgaccgctccggcccaggtccaggcttttgcgtcgcgccgacggcgccaggcctcgtaaagcaggatattcgagagaagcacccagagcgtaccgccgaagatgcctgtgtattcgtaccattgcacggcccacacttcgtgcgagaatccgttgcccagcagcagccagggccaggagaagtcgccggtcgtgtaccagtactccgtggcgatccagcctgaaacgagcagcgtgtaggccaatgccttcggtccctttttcgaaaccgtatggaagagcatgaaggcgaccatgttcaggaaagacgaggcgatcgtcgcggcgaaagggcctacgggagtggccagccagatccaccagatcgtagaaacattccagagtacgaaggtgaggagcgcccagccgaaaactttccaccacgagcggcgggaagcgtcgtacgaatcgctgatccagagcagcggcaccaatccgaacaggagggtgaatcccgttcctccgagccatcccggcgagagcaggagggtcgagcaaagtaccgcagcgaatttgcgccccatagaagtcattaatttctggcgacaaaagtaacgaaagccctgcatatttcaaaaaatatagaatatgaattccttctttgcggaatatgccgctgattctcgaaacagccgacgaatcgcgttgggcggaggagatcgcggaattaaaacggttttcggaagaatagtcgaacggttgcgattcgcttcccgtcgaaacggctgtttcggcgggaatttttatgcggatttccattcgcaagtttgtaaatcggaagcgtattcagtatctttggataggagtgtgagtgcttcccgttccttcgaacttataaatccgcctgccataaatatttcagcggtctttttacggtattttccggcattcgaagaggggggaggcgttccggaacagtattccgtctgtgcgggagattcaggaaatagctttcgggtcgaaaaacagccgggaagcgggtggctggatcattcaatatgcggggcgtcacggttacaacgcagaaacgatcgatcgtttttggagggtgtacagtatggttgctaacggggattcttactaactaataattaaaaaagttccgataatgaaacgattgttttttctgatagcgatagcttttttgatgactggttgcagtgacaaggatgatgaaaatgttgatatggcgagtgtcggacattatgtttggcaaaacgaaagcgatcaccgcataacattgaccgtaataggcaggtttgaaaatgaagttttgctcccgaaagagcatatttcgaaaacgatgatcggatttatttttccgccatcaccacgttcttatacgatagaggggatgaaaatttctttcgatgacgggccttatggcggtgttttctccatcccgacggagtatccgattgcgccgtacaatccgtgtgacgaatataattatgagatgggagaggaatataaggagagcggaatgcttcagcgacaatggacttatacgtttactaacgccgattacgatgcggccgtagctcgcgggccgatgaaggagtagtagcgttttactgaaacagcgaatccttcgagtcgaaatccccggcgcagccaatctgcgccggggatttcgactcgggattcgaccggagctcctttcgcgtggaacgtgcggaaatcggatcgcatgtccggacccgcgcgttcggccgttgccgccgaacgggaatattccgatcgtaagattgttttcgattactgttccggccctgcatggccgcccgtttgccgtaccgtgtcgggtttggccgcagtgagcgaatcgggccgcagaggttccggcgccggttttttttgccccgttttttcgggtgcgggcatttcggttgcagccggttcgatcatcgaagtataggtgttgtggcggatggcggcgatgacgattaccgcgatagcggcgatggccaggatcagtccgatgattcgtttagtcatggtcgttctgggttttaagcacttcgaccgcccgcagcatgacggggtcgatcgggtagatattcacgtaaaatcccgcttcgttcaggggggtgttccgtccgatgtaggcccgtaactgggcttcgatcagcttgcgcgagcgggcgatgtccctgtagtcgggctgtacgccgttgcgggccgcgtatcggatgaagtcgttcatcagctccttgtcggcatcgagcagggcctggagttccggaatggtcttcacggcgttcagagcgtcgcggtgacggtcggcgtattcgagcgtatagcggaagaggatgttgcgtcccgacacctcgaggaaatagcgggtcacgtcggtcgtatcgaccggtacgaacaggtcgggcatgatgccgcctccgccgtaaaccaccttgccgccgggcgttaccttgcgcagcgaatcgtcgaagtggatgctgtctgccgagaaaaactcgttgtgccggtaacggttccacagatcttcttcataccccagcgcatcgccgttggtgtagggtttctggatcgagcgacccgtgggggtatagtagcgtgcgacggtgagccgcagggccgagccgtcgggatagggtatctgccgctgtacgagtcctttgccgaacgagcggcgtccgatgatcgtaccccggtcgttgtcttgcagcgctccggccagaatttcgctggaggaggcgctgaattcgtcgatcagcaccgccaggggcagctcctggatcgtgccgtttccgtcgctcatttcgtccgtgcggttgtggcgccggtcttcggtatagacgatcagcttgtcggccggcaggaattcgttggcgatgcggatcgcctggtcgagaaaaccgccgggattgccccgcaggtcgaagatcaatcgcttcataccttgtgccttgaggttgttaaaggcggtgatgagctcgttgtgcgaggtgatggcgaactgggagagtttgatgtagccgatgctgtcgggcagcatgaaggccgcttcgaggcttttgatcggaatggcgccgcgtgtcacttcgacttcgaccggttctgcgattccctgccgttcgagcgataacttgacctgtgtgccgcgtttgccccgcagccgtttgacaatctcgttgttggggatcttctgccctgccaccagcgaatcgttgatccggataatgcggtcgccggccttcactccggccttgtcgctcggtcccgaagggatgacattgagcacgatgaccgtgtcgggcgccatgttgaagactacgccgatgccgtcgaactcaccctgcaacggctcgttcaccgcctccatttccgatttggggatatagaccgagtgggggtcgagctcctccatcagcagggggatcacctgctcggagagcgaatccatcgacaccgaatcgacgtattccgtttcgatcagcgagagcgtataggccagtttgttggtcggatgggtcagttgttcgaccagatttcgcagttgggcttcgggagtgctgcgacccagatagcgtcccaacaacagccccagcacaacggctgcggcgagcaggatcgggagcaggatcgcaagacgggagtttcggtacatcgtgttttcgtcggttttatggggcgttcatgatgatcgccgccgcttatttgttcttgaacgtataggtcagtcccacgctcaacagcaactgggtctggatgtcgtagttttgcgcccggttgtagtaaagctggaaattgaacgtcgtggtgaggtattttgttgccttgatgtcgatggtattttcccagcgtaccgtcggatggatttgcagcatcggtttgtcgccgactccctgcgcgtcattccaggcttggagggctttttcgtaggcgctgacgctggtatatctgtttttcatgttcaaattcgacatccagcccatgaaggagaagagcgtggtgcggtagcggaagatgcccttcctgccgaacgtccggtcgaagtcgatctggatcgaagaacctccctcgtatttcgaggttttgttcgcattcgaaaggccgtaagcctgccaccccggtttgtcgtcccattcgtttttgcggactttggcgctttcgacgaatacggcgctcagggcgatcggcgagaggttgatcttgatcggaaaacgctcgaggggacaggtgtaggtgaaaccgcccgatatgtcgaggtaacccggcgacataaaggtacttttccgatcgtcggccgtctgctgcgagcgcgacacgtaaccgttggcgaactggctgcggaatttgatgatcgagccgacctgccaactcttgttgatgatgtaggcgggattggtcgaaatctgaaattcgtcctggttcttgtaccaggtggcctcgctggtcgtagagcctccgtcgccggcgacttcgatattcatccggttgtagccgaacttggcatcgaacttggtttcgatggtaaagcgctgtttggtaaaggtgtgatgcaggaaaagcgtggcggccagaccgatcgagttatcgccgcccgaagtttcgatccacgaatcgctgtacgaggcgacagatccgagtatgccgccgccgaattcgagggtattgcgctccttgcggatcgcggcacgctcggcacggtagcgggcgcagctgaaataactctgtgcatcgaccgtcgtggggcggacttcgtttttgaggattctttccgaggggtcggtcttgatttcgtcgatcgtgatctgtgcagacacgggattgcttatcgccagggcgtagaggagggttgaaagcaggtaaaattgtttcataagcaactaattgatacaacaaatttagggatttctctacaaaaatcgctacatttgttagcaaaacgataaataataagataaagcgaacagtatgaaatatttcggagcacacgtaagtgctgcgggcggtcctgaaaacgcccctttgaatgcacataaaataggagctacgggcttcgccctttttaccaaaaaccagcgtcagtggagcgcaccgcccctgacgccggcccagatcgcggctttcggagagaattgccgggccgggggttacgtgccccggagcatcctgccgcacgacagttacctgatcaacctggggcatcccgagcgcgaagggctcgagaagtcccggacggccttcatcgacgaaatgagccgctgccaggccctcggcctcgaccgtcttaatttccatccgggcagccacctgaaccgaatttcgacggaggagtgcctggaccgcatcgccgagtcgatcaatatcgccctcgaccgcacgcagggcgtcacggccgtcatcgagaacacggccggacaaggttccaacctgggattcaggttcgaacacctggcgtatatcatcgacaaggtcgaggacaagtcgcgcgtgggtatctgcattgatacctgtcatgcgtttacggccggatacgacctgcgtaccgctgcggcttgcgatgcgacattctccgagctggatcggatcgtcggactgaaatacctgcgggggatgcacctgaacgatacgttgaagacgctcggcagccatgtcgatcgtcatgctccgctgggcgagggtgtgttggggatcgagtgtttccggtacatcgcccgcgactcccgcttcgacgacatgccgctgattctcgaaacccccgacgaatcgcgttgggcggaggagatcgcggaattaaaacggttttcggaagaatagtcgaacggttgcgattcgctttccgccgaaacggctgtttcggcggaaatttttgtgcgaatttccatccgtaagtttgtaaatcagaagcgtattcagtatctttggataggagtgtgagtgtttcccgttccttcgaacttataaatccgcctgccataaatattttagcggtctttttacggtatttcccggcattcgaagagggggaggcgttccggagttgtattccgtctgtgcgggagattcaggaaatagctttcgggtcgaaaaacagccgggaagcgggtggctggatcattcaatatgcggggcgtcacggttacaacgcagaaacgatcaatcgtttttggaatatatacactatgatcgataacgaagatacttattaaaaacgaggccatattatgaaaaagcgactgttattatttgcgatcctgtttttcgggttgtgtggttgtgataaggacaacggagaggatgtggatccgcccggaatcggccactttgtctgggtgaatgccagcgatcatcggattacgatgactgtgaacggtcagttcgaagatgagatcatgttgcccggagagcgtatttcgaaaacgatgatcggatttattgctcttccaccatcacctgatttgtatgtaatgcatgggattgaaattgtatttgacgacgggccttacggcggtgttttcacaagaccgaaggagtatccggcggctccttacaatccgtgtaatgagaaggagtatgtatgggaggatatgccggtggaaaacgatttgtcccattgggtttggacctacactttcaccaatgccgactacgatgcggccgtagctcgcgggccgatgacggagcagtagcgttttgctgaaacagcgaaatccttcgagtcgaaatccccggcgcagattcgctgcgccggggatttctgttgaatattgcttgtttcgttggagcgctgccgataattcgccgtcagattcggtcgaggcattcgcggatcaggcgggcgctgtcgcgcacttcctcctcggtgatcgtgagcggcggcgagatgcggaacgccgtatcgcagtagaggaaccagtcgctcaggatgcccgcctccttgaagagctccatcatacggaacatcttggccgacgagcccagttcgacggccagcagcaggccgctgcgccggatttccacgacctgcggatgatccgccagcagcgattcgtagaggacgcctctgccttcgacgtgttccaccgtgccggtttccaacagatattcgagggccgccagtcccgctgcgcagcagaccggatgtccgccgaaggtggtgatgtgccccagggtaggggcggtttgcagcgtgtccatgatctctttgcgcgatacgaaggctccgagaggcatcccgccgccgaaggctttggccaggcagacgatgtcgggtgtgacgccgtacttgcacatggcgaacatttcgcccgtgcgtcccatcccggtttgaatttcgtcgaagacgagcagcgcacccacctcgtcgcagcgtcgccgcagggcttcgagccatccgggaaccgggggccgtacgcccgcttcgccctgcacgggttcgaccacgacgcaggccgtgcggcgggtgatgagtcgcagttggtcgaaatcgttgaagtcgatcgcccgcacatcgggcagcaacggccggaatgcgcccttccactcctcgccttcgggctcacccatcaggctcatggctccctgcgtcgaaccgtgataggcccggcgcatcgagaccagctccgtgcggtgcgtgtatcgcttggcgagcttcagggccccttcgatcgcttcggcgcccgaattgacgaaatagacgctcgaaagttctcccggcagcagctcggcgatgcgtgcggcgtaccgcacctgcggccgctcgatcatctcgccatagaccatgatgtgcatgtagtcggccgcctgccgctgcacggcttctaccacgcggggattggcatggccgacgttgctgaccgaaacgcccgccaccagatcgtagtagtgtttgccttcaggggtatagaagaaaactccctcggcccgggccacctcgatcatcatgggttcgggcgaggtttggccgacgtgggccaggaactgtttgcgtagtatcgtattcatcgttttccttattcttcgggatatttgcgtcggagaatcgcttcggcgtctctcaccgaggcgaaggtccagcgatagaggatttcggcccgttctccggcagtcagacgccagtcgggaaccgtttcccgcatccgggacgagagcatgtagatcagaatggccgccgaagccgatacattgagactctcgaccatgccgcacatcgggatgcggagaaattcgtcggccgcagcgacgatctcgtccgagatgccggcgtgctcggtgccgaagaccagcacgaagggggaagccgcgacatcgaacgtttcgggagtcttgtcttcgcggtgaggcgtggtcgccacgatgcgataaccccgccccttcaggtcggcgatcgcttcggccgtagtgcggtggcggtgcaggtcgatccatttgtccgtgccccgcacgatattgacgttggggttgaacttgcagcgggtttctacggtgtggatgtcctgtatgccgaaggcttcgcagtggcgcaccagcgcactggcgttctgggcatggtaggtgttttcggtgaggatcgtcatgtagcgcgtgcggctgtcgagggtgcgttgcaacacctgccgccgctcttcggacatgaattccgtgaggtaagccgtacgttccgcgtaccagtcgaggggtttatttgcggtatttgtcatcgtcgtcgagcattttcaggtaactttcgtagcgctgccaagatatttcgccccgttctacggcctcgcgcacggcgcagcccggttcgtggacatgggtgcagttgtagaagcggcattggggggccaggcgcatcatttcggggaagtagtgccacaactcggcatcggcgatgtcgatcagtccgaagcccttgatgccgggcgtgtcgatcaggtagcctcccgacgaaagggggtacatcgtcgagaaggtcgtggtgtggcggcccttgcgatggctttcggagatatcgcccgtgcggatgtcgagccccggctcgacggttccggccagggtcgatttccccactccggagttgccggccagcagggtcgtgtgtcccttcagcagttcccgcacggcctcgatgccggtgccgtcgaacgccgaaaactcgaggacggagtacccggcgctttcataggtggctttgaatgcggctacggcttcgggatcctgtgccgccaggtcggctttggccagcagaatcgtgacgggtacgcggtaggcctcgcaggttaccaggaagcggtcgatgaactccggagccgtcacgggagagaacagcgtcacgaccagcagcgcccggtcgaggttggcggcgatgatgtgcgactctttggagaggttcgaggccctgcgaatgatgtagttgcggcgcggcactacttcgcagatgactccggcgtcctcttcgtcccgttcgcagacgacccggtcgcccacgactacggggttggtcgaacgtacgcctttcagacgcaggcgtccccggatacggcacttgaccgtttccccggcgtccgtgcggacgtcgtaccagctgcccgtcgtgcggattaccgttccggtgaattgtcgctccataattcttgttcatcgattgatacctgctctttggcccattcgagcagcgggaagagcgaatccgccagacggatcatcggacggtagcataccgaccggtcgagcgtcttttcctcggccagcgtatggtccttgttcagagattcgaaagccgagaagagcagcccgaggaccagcagcgtcttggctgcggataccgcgacacccagcagatggtccgggatgccgaagcctgcgaaatgaaacaccttgcgcaacagccgtcccacgatcgccaccgcgatcagtacgaccacgaagaccgccaggaaaccgcctgccgccgcgaactcttcgtccagatgcagcaatgcgcccgcttcggtaccgaagcggatgccgagccacgcccccaggacaatgcctgcgagcgagcaaagttgcagaataagcccctgccgccagccgttgaatacggcccacagcatcaggagtccgacgatcaggtctattacgctcatttggcttgtgtcgtttcgtttatgtcggtcgcatgccttcgccgatattgtttttgtccggtgaaagatccggtattcttttcggaagtaccttgatccgttttcagacaactttcgcgagtcggtccgagccgcgtttttcttctacaaagatagtgaaagccgagagaaaacgggaacttgttcccgtttttccgaggcgcatcctatctaaaactatgtcaaagatagcgaaaggtaagcgcagcgccaaaacttaatttccggtttttctgtttcttgcgggaccgggattgcaagtgttcccattatccgctccaaccatcggttttcggcgtttgttcgaacggtatttcccgcaaagatacggacgaaatacgtacaatcgaaaataccgatttttcgataggagcgccggaatcatgaaagatatggtatttggtgaaagattttaagaaacagcgccgttctctggcggtcggctggtcggatcgggtttaatataatataggtatttattcgctttaacggatgatgtcacgaagattgacgttcagtgcattgcatatgatacacatggtctttaccgtaaggttggtgcgtccggattcgatgcggctcatattggatctttccatgtcgcagcggtatgcgagttcttgtacagtcatttgtttttccttccttaactctctgattttattcgagataaattttatctcttcctggtagttgattgtcattttaactttttcaatgaaaatttttgtcgtacaaatatttatatatatatttgcaccgtgcgtatcatatatgatacgctttcggagagttaatacgctcataataaaatatatatagtatatgaactcatttcaaaacacttatcaattatgaaaaaaacactatttgtgaagtttctgttcttacttctgtgcgggagcgtgctgactaccgcaggttgtaaggattacgatgacgacatcgacgccttgcgtaatgatgtcgaagatctgaagggggcggttgtcgagctcaacggtttcgagaatcgtattgcggcgttggaacggacccaggccgctttcgaagcgatcgatttttccgggtttgcgaaaaagagcgatatttcttcgttgcaaacccagatcgaaggatgtgtcaaagacagcgatctggctgcgaagatcgtcgcagcgatcgaatcttcactcgccgacggggccttgcaggagaacctgaacagtctgaaatcgggtattctggaagaaatagcgggtatttacgctacccaggaaacactggagagcgttcaggaaacgctggaaaatatgattgaactcaaaaaggatgccgcaggtttttcgctcgaagtgacgcagctcatcgaatcttacctgtcggacaatggtttcgaggctgccggtggagagctgaccgacagtcaggtgagccagatcgaaaccgccgcctcgcagtggatcgccgatgctatcaaggccgaactcgagacggccggcagctcgatcaataaatggctgggcgatgaactggcagtttatatggaccagatgacattgggcgacaacctgttggggcaggtttccacgcaggcgatcgcatcggttatggaggaactggacaaggaggccagtgcgctgactgaaaagatccagggactgatccgggaaaacaacggttcgctcgtgatttccaaagaccagctcgaccaggaatttcagaattacctggcgacgttggaggccaatgtcggtttgctcggtagtcgtatccagtcgatcgtttacctgccggattatgtggacggtctgatctatttcggcaacggggagcagtatatcgtgttgtcccgtgagaacgaagttacgcacgaaaccgagtaccggaatctttatttgcgtcccagtgaggaaggcgagcagatcgcgactctgcgattccgtatgacgccggcccgtgctgtgaaaaaatatgccaatacggaggccatgtcgctcataaccgaagaggtcggaacgcgtgcggcggccggttttacgatcgaagagatcaaggacatcgatgaaacgaccggcgaatttaccattgtcgctacgacggattacgattatgtttccgcagaaaaggccggcaagacgcaaatggtcgctctccatgtcgatggttcggcgttgagcgaaggcgaatcgaacgatttcgaaacggactttacgtcggcttttatcggaaccgcctatgccaaagcgggtattcagatccctgtgacgaatttcgtgttggcccgggccgatgccgagaatgagggcgaatacgtcgaatataccgacgaggtgactaccgaagtaaaatatacggacaaagaggttcatggcgtgttggccggatatacggtcatgtataaggacggtgaaacgatcctgccgctcgcagaggctgccgaagctaataattggaccgtggatctggcggcgctggtatcggcgtcggcggaatttaccttcagtgatccgggtagcgaggagttgtatgccgtcgatggaaaggcgcttacattcgctgttgccgagtcggaaactgcgttgatcggacagacagtaaccgctgctgcgacttatgcattgctcgacgaagagggattttcgctcgaagtgaaagccggtgccgtgaataaattctccatcgcacccgacggtgtcgaactttccacgccgaaatccgaagtgatgtggacgtatgctgccgctacctccgacgatacgtatgaggcgaaaggacttgtgctgactccggataagggtatgctttctgccgttcagtataatgcgctcaaggataatgagaatctggttgtcgaactttaccggggtacggagcttgtatcggagatcgtcccgtcgatcgaattgccggctactccgacctatgatacggatgtgcaaacggtcgatttgaaattggtcggcgatctggcacagagtgctgaatatgtcgtaaaagccgtttataccaacgacgataagaccgtcgtaacgattacgatccccgtatccgtaacgggtattcctgaaattccaatgctggagcaaacgctcgaattgccgtataatgcggcatcctcgacgggccatcacatcgccgtcgaagaattccgtgcgctcctttgggagagtctggatcagacggcccgggcgcaattcggagaggaaacgttcatgcagctctcctggacgagcgacatggtgaaggatgaagccggcaactatgcgacggtcggagcgagcggtaagaacatcaactttgtcttcggcaaagctgcggctctgaatgtttcctacaccgtgaagaacctctttacgactgccgatcccgtacttacgttcgaagctgtcctgcacgtgactgttacggctcccgaaatcgagttgctgcgcggatcgtcgctttcggacgacgatcgtgcccaggccgtaatgaagatcgaaggcagcacgctgcagatcgatgcattcgacctgtcgaaaacctggtacatcgcaaaagatgctccggcagaagcaaaggtcgtttatgcgacccaggcagaaggggctgtcatcacggatgcgacactcgattggggtacctgcgacgaattgtcgatcgtggttaccgcccaggtgatgtatggtggcaaggcgttgggcgagccgaagacctttaccgtatcgatcgctgatccgatcgctgacgcgacgattgcggtcgaaaccggaaaactcgtcgccaaagtcgatgaagatgtaacgctggatgtcgctacgttgcttacattgaaggcggtcaatgacgtgaatgtattcgatggttcgacaaatgcgcagaataccaatacggcggtagccgcaaccatcgaatatggcgaggcggtggtttccatccccgacggccgtgtgaagttcgatgcggagagtcatgttcttacggtagtcgaaggcggtgatctggaactgatgaaggagattaccgtaacgattccggtgaaatatgtctatacgttcggcgaacgtacggcgcagatcgttgtgaatgtgacgaaataaccgcatcgtggacggcgattgtttcaggttttcttcctgcgggggaaggagcggaagaagataaccggaaaatcgccgggtgaaaaggctccgaatctttattgaatggcgggaccggctctattcagagccggtccctttttgatatgtttttgcggaggatatgacggcaatacgagtgtaggcgacactgcggcgaaggctgtgggtatgcggcggtcggatgcgaaaatcgtgaattttccggtatattcgggcgtataacctgccgatcgggttatgcactgtcggctgatgttgagtatattctgcgcctcgtgcgaagtattctctgttttttctgtcgcttggaaattccggatattgatttttcggttgcgtttatccgaagaacaatcccctcttgcggaggggattgacgtgtcgagttgtatgcttcggaagcgtacggtccggaaaaggtccggatttttaacgggcagatgccttttattcccgctcttttttccgcagttcggcgaaacagtggcggcagatcggttcgtaggagtcctgcgcaccgagcatcacctgtttttcgtcgttggtcaggcggtgcgaatggtgcgccaggttgccgcaccgtacgcagatggcgtgtactttggttacgtactccgccgtagccatcagcgccggcatcggtccgaagggcttgcccgtgaagtccatgtcgaggcccgccacgattacccgcaccccgctgtcggccagttgccggcagacctccaccagtccctggtcgaagaactgcgcctcgtcgatgcccacgacatcgacgtccgaggtcatcagcaggatattctgtgccgaatctaccggcgtggagcggatcgcgctggcatcgtgcgaaacgacctcctcttcggagtatcgcacgtcgatgcggggtttgaagatttcgacccgcaggcgggcgaattcggcccgcttcaggcggcggatcagctcctcggttttgcccgagaacatcgagccgcatatcacttcgatccaacctttctggctggcattttccaaaaacatattattacaactttgcttcgtttccttattccggacaccggccggtcgttactcttcgacccgggtgatccgggctccgagggcgttgaggcgtccgtcgatgtccttgtaaccgcggtcgatctgttcgatgttctggatcgtgctcgtaccttcggcgctcatcgccgcgatcagcagcgccacacccgcacggatgtcgggcgaagtcatgcgcgtagcccgcagccgcatctggtggtcatgtccgatcaccgtcgcgcgatgggggtcgcagaggatgatttgggcccccatgtcgatcagcttatcgacgaaaaacaggcggctttcgaacatcttctggtgaatcagcaccgagcctttggcttgggtggccaccacgaggaataccgacagcaggtcgggcgtgaggcccggccagggtgcgtcggcgatggtcatgatcgagccgtccatgaagttctcgatgcggtagtgctcctgttggggaatgtagatgtcgtcgccgtgctgttcgaagcggatgcccaggcgggcgaactgggcggggatgatgcccaggttctcgaacgaaacgttgcggatcgtcagctccgaacgggtcatggctgccaggccgatgaagctgccgacctcgatcatgtcgggcagcagcgtgtgttcggtgccgtgcagctcccggacaccctcgatggtgagcaggttcgaggcgatgcccgagatgcgtgcgcccatgcggttgagcatcaggcacagttgctggatgtaaggttcgcacgcggcgttgtagatggtcgtgaaacccttggccatcacagccgccatgatgatattggccgtgccggtcaccgaagcctcgtcgagcagcatgtagcaccccttgagttccttgcagcggacttcggagcaggcggccgcagtgtcgaaatcgagcgtggcgcccagcttctgaaagccgatgaagtgggtgtcgagcctgcggcggccgatcttgtcgccgcccggcttgggcatgtagcccacgccgaaacgcgccagcatcggacccagcagcatcaccgaacccctgaggcggctggcccggcggcagtagtcgtccgagcgtaggtagtccgggtcgatgtcggcagctcggaacgaatagctctcttcggacaggcgctccacttcgacgcccatcgcctgcagtaattcgatgagttgtatcacgtccaggatctgcgggacgttgtgtacgattaccttttcctgcgtgagcagcgtggcgcagaggatctgaagcgcctcgtttttggcgccctggggcgtgatttcaccgcgcagccggcggccgccttcgactttgaatattgccatgttcgatctgttttgagcgaatgggggaggcgaaccttgcggcaaacgccgctccggatttcccggaatatctcccattattttacaaatatagtgaaaaccgtgcggcgggccaaatttgtccgggccgtcggggtgtattttctattccataacgaggggcgtaaaaggaagcggcagtcgcatttatgcgaacttgcccgaatcgcattctgtcttttcctacaaatatacggaataggtcggaaatcgaaaaggggaaaactgaaaattagaatcggattgataaatatcatcggccggattcattgcccgtgtttttagtctgtcatatgccctctttcgctgccggattaaccgctgccacaggtacaggagatgtgtcccgtaacgggattcgaggcgggtgattcgttgtcacaggcagtgcggattgtgtgtttgcggaaaatcggtggcgtacttacctccggggtactcggagcggaaggacgcaaagtcttcgagtgcgttgcgttcgcccggcgaggcggtaaaccaggatcggatgcggctcttttgcccttttctgcgaaagaaaaggcgtgtgaactatgctgggaaccggtaatttttgccttgcagcttttacggccttcttgaaaaaaggctgtgggcactttcactttgtcgccggaaaaaagtagggacgcaccgcttaaaagattgggtcggaaagaagcgtttctaccgactgaacagcaagggcggtgcatcaatgcaccgcccttgctatggcttgaatcccgaaggaattaagcgtacttgaacgtcgattcgtccgatacggtcaacttcttgcgacctttcgcacgacgcgcagccaaaaccttgcgtccgttggccgtagccattctctgacggaatccgtgcttgttgattctcttccggcgcgaaggctggaatgttcttttcattgccatagatctatcgtgtttttattgttttagcgtacaatgcggagtgcaaatgtataatctttttcttgatctgccaaaaatatcgtaaatttttcttcttcttcgttccgggtgcgactccgcacaatccgctttcgtcccgtgtcttacgatcggttaccgttccggtgcggtgtctttgaagaggtccgcctcgccccgttcgaccttgccgtacatgtcggccagttcggcgatgacgggagaaacgtattcgatggtgtcgctcacggcgctcttgcctccttcgcccttgatgcggtagagcatcgcggcgtaaagcgcccggaagcagagttcgatgtcgctcatttcgcgccccagcacggcccgcagacgcggcagctcgggttcgagtttggcgaaagtctgacggtagtgctccccgatcggcagcttcatcagttgcaggtgcaggtcgttcaggtcccctatcagatgcagcgtatgctccaggtgccccttttcctctttgccctcttcgcgcagcaggttggcgatgtccatgtaccagatcaggtagttgtggcgttgtccctcttcgattccgcgcggagcgatgagctgggagtagatggcctcggggctgaattgcagtgcccggagcaggtcctcgatctgccagaggtagagaatgtattcggcgatgttttcccgccgtttggccagtgcgatgtccatggtgaatttcgttttgcttcccggcgggaggcggagttacttgattttgttgagccactgcagcggcccgtccttgtgttcgaggaagtagcgctgcgatttgagcaggttgcgcgactgaagcaccatgctcttggtttcgttcaggatcgtcaggtagaggatgctggccttggtgttggagcggttctcgttgatacgcgtcacctccgacttgatggcgtcggcgatcgcctcgaaaagccggtcgcgcatttcgagcaccatgtccaggtcggagaagtcgcccgtgcgcagcatgttgttgatgtggcggtagatcgactccacttcgtcgttgatgtgcatcaggtcctcggtctgctctttcgagagtccctcgtggttgttgtcgatatgttcgaacgccggacgggtgatgtgcgccagcgccttggtcatttcgttcagatagtccaccacctgcacgtagtagtgagccgtatcgatgtcgcctttctgcagtttgcgcagggtgggcagcagggagtacttgcgttcgcgcgactggtagaagagttcgttggattcgcgcaccatttcgcgcagcaccttgcggttctctttgaagacggcgatcagcgtgcggtcgtagatgcgggtcgtgcgctccatcgtggcgcacacctcctgcgtgatgttatagatgatgtcggagccggtttcggcagctttcacggcggcggtttcggcagctttgttcttcttgaagaagttgctcttgacgagcatgtagccgcacagcagcgtggtgacgacgaaagcggcgatgccgccgtagatcagtatgagccccatcgccagggcgatcaggaagccgccgacggccgtgatgaaccacccggccacgacggtcatgacgcccgagatgcgatacacggcgctttcgcgtccccaggccttgtctgcgagcgacgatcccatcgctaccatgaagcagacgtaggtggtcgaaagcggcagtttgagcgacgtggccaccgaaataagcatggcggaggtcgtgaggttcaccgtggcgcggatcatgtcgtagggggcgccgctgtgctcgatgtcttcgtactggaagcggctgctgatcttgtcccggattcttttggggatcgtgcggtcgatcgcgttgcttgcattcagggcggcccgtacgatggtgcgcgagaagagcgacgagccgtactgcgtctcgctctcgccctgcgtcgaaagcgaaatttcggtttcggtgacgtgcatcgcctttttcgaggtccagagcgtgacgatcatgatgacgcctgccgtcatcagcaccaggaaattggccggaacgctggcgttcagcccttccatcagaatcgtgctgtcgccggcatgacgggcgatgctgtatgcgtcgaatccggctaccgggacgccgatgaagttcaccaggtcgttgcctgcgaatgccagagccagagcgaaggtgcccgagaggatcgtaagtcgcagaatgttgattttcagccgttgcaggaagaagagcagcaggctgccgacggcccagcacaaaaagagggagagcaggatatgctggtcgatccattcgatcgcggcgcttccggcgagcggggttttgagtcctttgaagacggcgaagtagaggatcgccgtgaaggaggctccgcaccagaaggcaccgaagcggcggaacatcgccgtatagcggaacgagaagatcagacgggagatatacatgattagggtgccgaacgtgaaagcgatcactacggagagcagaatcgccgaaacgatacccatcgcgcggcccgtgttgatgaaatggttcaggtcgcccatgccgagggccccgtcgttggagatcttgtagatcgaaacggcgacggcggcacccaacaggcagaagatcagcgatacggtcgtcgaagtcgggagccccatcgagttgtagaggtccagcaggatgacgttggcgaacatcacgcccatatagagcatcatcacttcgtggaaggagaaaagccccgggttgaacataccgttgcgggccacttccatcatgccgctcgaggtgaccgtacccaacaggatgccgatcgaggcgaccagcagaatggtcttcatgggggcggctttcgaaccgatggccgagttgaggaaattgacggcgtcgttggaaacgcccacgaaaaggcccgaaacggccaggattcccagaataacgacgataacggtgtagatttcgctcatgttcgggattttttacacaaaatttcagacaaatttacattaaaaatccggatggaccggttgtggcggtcattgttaacattaaattaacatggagtcttttttacgtgctttcggtttcggagtttattatccggacgatccgcacacccgcacgccgggtgtgcggatcgatataccggtacatgccacggtcgaaggtctgcataccggatgcgatgaaattctggaaaaagccctggagatggtccgtacgggcgaatacgacccggcagccgaaaagtgattcgcatgcgatgaagatgaaaaagaggggccgtcggcggccgaaccggaaatcggagcggtaaggtaccccaaaagtgccgttcgatccgtcttttgcatttccgaaatgcggttttagtagccctctttgggtgtgtagcggcccgaagctcccttcgtggaggggagccagggaaagggtagaatttacaaatgcggcctgagccgcgaataggcgaccgtcggataatggtatcttgggacatatgattacctttcgaaactatgattcttggcaatttcggcgtacacagcgacataaaaaagggttgtctaatgcacatagacaacccttttttgtaaaaatccgccgatttactcctcgtcggtgtcggtataggccttcagcagcttgtcctgcacgtccgccggaacctgttcgtaggaggcgaatttcatcgtgtaggtcgcggcacccgaactgagcgaagagagcgtcgtcgagtaacggtacagttcggccagcggtacgcgggcgttcaggcggtcgaagcccttgtcggactccatgcccataatcatcgcccggcggttttgcaggtcgctcatgacggcgcccatgtagtcgctcggcgtgaggacttcgacgtcgtagatcggctccatgatcttcggtcccgcgttgcggaacgcctctttgaaagcgttgcgggctgccagcttgaacgagatctcgttcgaatcgaccgggtgcatcttgccgtcatagacgatgacgcggatgtcgcgggcgtaggaacccgtcagcggaccttcgtccatcttctccatgatgcctttcaggatggccggcatgaagcgggcgtcgatcgcgcctccgacgatcgccgtatagaactgcagcttgccgccccagggcaggtcgtactcttccttgcccttgatgtttaccgccagttctcccttcccggggaccttgtagctcttgggttcgggcatgccttcggtgtaaggctcgatcaacaggtgcacctcgccgaactgacccgcgcctcccgactgtttcttgtggcggtagtccgcctgggctaccttggtgatggtttcgcggtaggggatcttcggggcgatgtaatcgtactggagcttgttctctgaggcgatgcgcgagcgcaggatgttcaggtgatgttcgccctggccctggatgatggtctgtttgagctccttggagtagtccaccaggatagtcggatcttcgtatttggcgtcgttcaggagcttgcccagtttttcgtcgtcggcctggtccttggtcttgatcgccgcacggtagcggggttcggggaagacgatcgggtcgatcgtgacgggcgtcccgggcgccgagagcgtgtcgttggtgcgcgtgcccttgagcttcaccgtgcagccgatgtcgccggcggccagttcggtgaccttgatgcgattcttgcccgcgacggcgaagagctgcgagagcttctccttgttgcccgtgcgggtattcaggagttccatgccttcggtgagcttgccccggatgacgcgcaggtaggatatttcgccgatgtgctgttcgagttggcttttgaagatgaacgctacggccggagccgcttcgtcggcctggatctcctctccttcggtcgagaggaaggcggggactttcagcgggccgggcgccacgttgatgatgaactccatcaggcgcttggtgccgatgtcgcgcttggcgctgccgcagaagacgggcatgaccgcccgacgggatacgccgattttcaggcccgagcggatgtcgtcctgcgtcagtgtgcccttctcgaaatagagttccatcagggcgtcgtcgtattcggcggctgcctcgaccagctccttattcagagcctgggccttctccgcctcttcggccgggatgtcgagctcttcgcgggtgccgttctcatctttgaagcggtacattttcatcagcagcacgtcgatgaaagcatcgaatcccggacccggattgaccggatactggactacgacgggcttcacgcgtgaggccgcacggatggattcgagcgtagcgtcgaacgacgccttgtccgaatcgagctgattgacgaaagcgatgagcggcttgttcagcacacgggcataacgggcctggatctcgctgcctacttcccagccgttctgggcgttgaagaccatgacgcccacgtccgccaccttgaaggccgagaagaggcttccgcagaaatcgtccgatcccggacagtctatgatgttgagcttgcgctccatgaattcggtgaagaggatggtcgaatagatcgagcgcttgtactcgtgctcgatatccgtgttgtccgagagcgtgttgttcgcctctatgctacccctgcggtcgatgaccttaccctcaaaagccatcgcttcggcaagggtagtttttcccgtgccgggagcgccgataagaacgatgttcttgatttctttcgctgaatagtttttcatattcgttatctttttataaggtttttgcgataccgattcgtcctggcggaaaatccgccggtgattttcaaacttcgccttataaatatacgaaaaaaatcgatcggccaaatttccgggcataaaaaatcgcccgaagaggggcgatttttttaatttttcaaaaatgtcgaacctgaatcccccggcgggcgtttgtccgggtgttccggtcggcggcggatcatacttcgacgccggtcagttcgcggacggcccggcgcccctcgtcgcccagggagagcgaatacgaattgacgaagaagtcgatgtggtggtcgatcacccggtcgtcgagctcccgggcgtgctccttaatataggtgcgggattcctcccggtgtgcgaaagcatattcgatgctcgtgcggagcaaccgttctatttcgcagcgaagctcttccggcagtgtccgtcgggcgacgatggctcccagcggaagcggcaatccggtgcgggattcccacaactctcccaagtcggcgaccagctccaggcccagtttccgatagacgaaacggccttcgtggatcaacaccccggcgtcgtactccccgcgtgccacggcgggtgcgatttccgagaagagcaccggctctttttgcgtgatcgacgggtagaggcggctcatcagggcgttggccgtagtgtgcagtcccggtaccgcgacccggcggatcgaatcgggaggtgttccctgccgtgcgacgaagaccggtccgttgccgcgtcccaaagccgaaccgctgtccagcagggtgtagcgggactgtatttccggcagcagggcgtagctgattttgcttacgtcggtttcgcctgcttcggcacggcggttcagttcttcgatgtcgtagtaggcgacttcgaaggttagctccccgcagtcgatgcgtccgttcacgagtgcgtcgaacatgaaggtatcgttcgggcacggagaaatatgtaggcggatcgtgcgtttcacaacttcgaatcgcttaattgccgttgccttgctgcgtcccgtttttcttgcctccgaagcgtcccagcagccagccgccgccgaaaacggccgcgaggagcagaatcttccacagctggttcgagagccagaaatagatgtttttcgagaagacgacgatcagcacgaaggccacgacgatcagaacgatgtaaataatccactttttattcataatccggaagtattcgaatgattgtttttgctaatttttctgcactttcctcgatgcgccaggccgaacgcgggtcgtcggtatagttcgacacggcccgcacctcggcgccgggcactccgaatgcccggcagacggccaggaaagcggctccttccatattttcaatttgcgtgccggacgctgcgactcccgtgcgattggtcgtattgctttcgacggtccgcaatcctgccggaatgaagtcggccgcatagcggacggcgtatttcccgggcagttcggcgattcgctcccctgcgaccgcgacgacttcgcatacggctaccgaacggtcggaagctccggcgatgccggccaggatcagccggtcggggtgttcctccgcgatgatccgggccgtcgctgcggctgcggccgccatgccgactcccgcgatgcggaccggcgcatcgggacatgcggcccgcagcagggccgcctccgtttcggtcgggatgaggatcagcgttcgcattttattaggaggattagcgaccgacgacggcttccagctcatcgaccgtgatggggatgcgcttgtcgcctccgatcatgcggctgcccgtttcggtgacgatgacgtcgtcctcgatgcggatgccgccgaaatcgcggtaggcgtccagcgcttcgtaatcgacgattcccttgtatttgccctcggccctgcatttgtcgatcagcgccgggatgaagtagatgcccggttcgtcggtcatcaccgtacccggctcgatgcgccaggtcgaacgctggatgcaggtgcccgacttggcggcctgctccgcgatttcggagaagtcgaagctgcgttctccgatggcttcgcagtcgtgcacgtccaggcccatgccgtgtcccagtccgtgaggcatgaagagggtcatggcgccggcagcgacggcatcttccgccgtgccccgcatcagtcccagcgaaatgagtccttcggcttcgatgcggagtgccgtgttgtgaatatccatgtagggcatgtggggggcgatcatggcggccacccggtcgtgcgccgccagcacgatgttgtaaatgtctttttgtttctgggagaacttgccgcttacgggataagtacgggtgtggtcggaacagtagtagctcaatccctcggctccggcgtcgcacagcagcaggcggccgttttgcagtacgccgtcgctgtgcaggttatgcagcgtttcgccgtgctgcgacacgatcggcgggaacgacacgccccgtccgaatgctttggaaatgccttcgatcgtgccggcgatttcgcgctcgacgatgccgggacggcacatcttcattgccgtagtgtgcatggcgtagccgatgtggaacgatttttcgagctcctcgatctcctcgggacctttcttttcccgcatctcggctacggccatcatcaactcgaccgacttgtgatcgtggagtgcgccgggtttgaggcccagcaggtcggcgagcagcagcttggtttcgcctcggtaagggggcaggtagtggatgcggcgtccctggacgatggctttggtcaggtgcgttttcatgtcggccagcgggaaggtgttcgaaacgcctgcttcggccccttgttcgcacagcgaaggctgcggccccgtccagatgatgtcttcgaccgtgaagtcgtcgccgtacagcgcaacctctccggagtcggcatcgatcaggccgaccagcgccggggtgttgagtccgaagtagtagaggaacgaggagtcctggcggaaataataggcgttgttgaggtagttgttgggtgtgagcatattgcccggaatgaggatcaggccgctgcccatcttgccgcacaaggcgctgcggcgtcggatgtagatttcttttgcaaacatagtcgtatttcctgttacaatccaaataaaattggatcaaagttttcggttaaatttgtttttatcttatttacagcgtattgcatttcttggtgaacttctcggccaaaggtcaaggcacgagagcctccgccggcctttgatcgagccggtgcggaggcacatcgtgcttaacacctttggctctctcgaaagccgagatttcagaacccgaaaaaatccttcgataaacagattttccttagcggtcagctctctgccgcatatcccttattagtttacaaaggccagaggagcagattattttaagcggacgttaacgccgcaacaactatgtagtattctctctgggaaaatccgtttaccggaagggtttctctatgacacgatactattgacatattcggtctgatgtttcagcacaaagaatagacggtttaccagtttgcgggcgacctttacgatagctttgctcttgggcatccgtttgcattgttccgtatagaacaggttcatcgcagggtcttgacgtaccgccacccatgccgcttctatcaggttacagcgcataacggcgtgttttcgtatggtaatatcccccgtcccatctttctctccgctggagtggcacatcgggatcattccgatataggcagccagttgttcggcattgcggaagcgggttatgtcgcatatctcggagaggaacgccattcccgtagcctgcccgaaccccggaacgctcataatcaaccgcagcggttcgcggaatcgatccgtcttggccaatgtccgtaaagcccgtgtcatctccagtttctgacggcgtaactcttccagatgccggatatgaatgtcgagggcctgacggccgctcggggtgagcgtctctatctccttcaaccaggcgaaaaagcgcttcgaccagttggaaaacggagtgagaaactcctgcggaatctcgatgcctaaataccgaagttgagacttgagccgattcttctgacgggtcgtgtctttggttatcgagttcttcaatcttatcaaggaacgcatctccaacgatacgctgtccggcgtataaatgcctttcagctcgttggctcttaaactccgcgccagcttaccgctgtccacggtgtcggtcttacgcagcttttcgctgctcttggtcggcacgtcggccggattgaccacgatgttgtcgatccctaaggccgtcagacgctcgtgtatccaaaatccgcagaagcccgcttcgtacaccgagtgatactcggcgcccggataactccgagttaaaaatccgtacaacgcttctgggctcggatgctggctaaacttcttcaatacggaggtttcggacaagaccgtaaccgaccaactcttcaaatggacgtcgattcctacataaatcttttgtcctctgaaactaattttgtttctttgctctctcatggctatcgtcgttttagttagtaaaggttttgcagctttaatctaaccaaaatctcgatagctttttcatttatccgctatcatcgcggcttaccctgattgtaaacatagggattatttttataattttccggcgaaacggttcgttcttcgagaggacgggcccggcttctgtccatccgcgatgccggagcgcacgccgtccgaacctaattttggtaaaggtagtgaaaaaaatcggtaattcgtgtcataaaacgactccttgtgacgttttattaaaaacagtgtgtcgaaacggcttcgggagtctatgccggttttcgcaaatcgcttccgattccgccggaccgaatgggcgacgggacgcagggaacgggttctgcggccggatcgtcagtaaaaatggagcggattttagatgacctattaaaaaaaatactatatttgtcccattggtctgttgtcacgaagaaaatacccgttcgtggcattttaatgtaaatttcaaaattattgaactatgaaaaaaatcttttgtctgacgattttggctgtcctgtgcactttcggcgttgcatcggcacagcagtttcccagtgtgcagatcgaaacccaggatggcaagacgatcgacaccaaaaccctgatcgacggcaagaccccggtcatcatctctttctggtccaccacctgcaagccctgcatcaaggagttagacgccatcagcgagcagatgatcgactggctggacgaagcagacttccgggttgtggctgtttctgtcgatgattcccggtctatttcccgagccaaggctctggcggccagccgcggttggactaccgatttgatggtggcctacgataagaaccaggacttcaagcgtgcattgaacgtgaatgtaactccccacgtgttcatcttcgacaaggacggaaagatggtgtattcgcacacgagctatctgcccggcggtgagatggagctgattcagaagatcaagaccctgcagtagtcctgtaattccaaattgagcgacgaatgaagcgacttttacgaatcacggtcctgttctccgtaaccttgttgtggtggggcgaaaaggggtatgctgcaactccggcgatggacgcagcagagaaagaaacggtttccgcaactgttgaagcggaggcggataagaaggacccgaaatcggataaaaaatccgacgagcccaaacgcaagcggaatttgggtcatttgagcggcagtttcgaaaccaatacgatctactatgtggaggacagcaagaccggtgcggtcgttcctcacaacagttacggttcgaacaacttcctgaagctcgactaccagttggggcgtttttcggccggcgtgcagctcgagtattatccccatccgctggtcgggactccgatgcagggttatgaatatgtgatggaaggtttctcgatcaataacctgactgagaagtatatctcgtggacggaccgcaactactcggtgaccgtcggcgacttttacgaacagttcggcagcgggttgatcctccgtgcttgggaagaccgggctttgggcttcaacaattcgctgggcggtgcacgggtcacgttcaatatcaaggacatcgtggaaggtaaggtgctgtatgccttcccgcgtttcaacctgggatacctttcgacccagattgctggcggcgacctttcattctcgctttcgaatgccatcggcttgctggatcaccggctttcgctcgagggcagcatcgtcaaccggcatttcaagaacctgccttcgtggtacaccgagtatcgggacgattatgatttcgacctttcgaagaacgtaatcagttattcggggcgtgtcaattacgagtacaggggactgtcggccaaattcgagtatgtaggcaaaagcaaggatgtctatctggacaatatgaccggtgaagaggtgttcaagcgcggtgacgcacagttgttcgaaatcggttacaccggcagcaattatgctgtgatggcgcagttccgccgcctgaactacatgcagagccagctttaccggcccgacggcggaagcggcagtttgggcctcctgccgggcaatacgatcaattacattccggccctgagtccgcaacatacctattatgctggcggattggatcctaacagtccccagcaaaacggagagatcggcggtcagatcgacgcgttttacacgttcaggcgcggtacggccatcggtggcaagcgcggattgaagatccatgcgaattatgcccgctattattccatcaacgggacgatgagtaaacccggaaccaatttctactaccgggatttctcgttcgacatcgataagagttggaacagcaaactgcgcacggttcttttcgtgtcgttgcagaagaatgcgatgcacggtggggaagacgtcatccgccagaatgttttcgttgcggacgtgacctataagtttacgccgaaattctcgttgcgggccgagcttcaatatctctatgcgcctcatgcggagggttccaaagaggtggatggtgactgggtggccggattgctggaagccagcttcgcccccaagtggagtatcttcgtacaggatatgtacaaccacggcggttcggagatcaactactactcggcgggcgccagcttcacccactcgttcattcgcatcgcattgagttacggacgtaaccgcgcagggtatatctgctcgggcggtgtttgccgcgagatgccggcttatacgggcggtaatctggcgatgacgctgactttctgatcgtgaagattctgatcgtcgaaaattcccgtatgtttgaaaatctaagaaagagaaaaatcaaccaaaattactgaaattatgaaaggacgaactaaatttttcaactatttcatcgcctgcattgcgacgctctctctggcgactttcgcagcgtgcagcgacgatgatccggagactccgtccggcaaattggtgctgacggcgagcgcttcttcttttgtcgccggtgaaggcaacgtgactttcatggtgacgtatgacggggaggatgtgacctcgcaagcagcgattaccaatgtgacgaccggtgaaccggtggaaaacgctgcgtggaccacgacagagatcggcgagtacaagttccaggctgtttacgacagctatacttcggatcccgttacggtaagcgccatagacaaaaacaaagacaaagacaaagagttctatcgctacgtactgctgctcaagtttacgtatatgacgtgcgggaattgtgttacggcacaaggatatttcgatgcgctggatgaagcggaccgtgaccattttctggtcgttgccgcccaccagcctgaaggaatgccaatggatccttattggtgttcggaggggattagtttgaagagtaagatgaaagtaggtgtgtatcctacttggtcttataatttcgaggatttggttgtcggtatcggagcgggtgccatttccaaaacttcgatccggcagcagatcagtcatgcggagaaaacctatccggccgtttgcggtgtgaaagcgacctccacgctcgaaggttcgacggctaagatcgaggcgaccgttcagttccagcaggccggtaattacaagatcgcttgcgtgctggttgagaataatattgaaaacaaggagacgtacaatactttcaaccatgttttgcgtgcggcccagaccgatatggagggcgatgccgttacgccggccgtaactgctccggaggagcgcacgttcaatttcgaggcgacgatcggggaggactggaatgccgagaactgcgccttcgtggtttatgtattcaaagaggaggccaatggcaagtatattgtcaataacggtgctgaatgtactgttgatggttctgtggattacagatatgagttgtaggatataatttgtataaaaaaatcctttgctagcaacagtaaaggattttttttatatcttgcaatgtgttaaaactttaattattgttagaagtttttttgaaaatgttgaattgtaagagaatattatctttcaatagataatgagtaacttatacatttttacttttgattttttcatccaattttaacctttaatcaataataactatgaaatggcattttaatttctttagatttgctgtcatgtgtgcggcttttgttgcccttgccggttttatggcttgtagcgacgacgattccgaatccggctcggaacttgtcttgtcggcgagtacctcttcgttagcgggggggggcagcgtgacatttacggtggcttttgaggacagggatgtaaccgccgaggccgtgattaagaatgtaacctctggctctgaagttcagaatgccacttggacgacgaatgtggcaggtacctatgagttccaggccgcatacgatggcatgttgtcgaacgtcgtttcggtgaaggtagaatctgactcgaaatccgatgctttttaccgacatgtgttgttgacgaagttcacggcgacatggtgccagccttgtgcgcaggcgcaacggtatttcgagcaattgaaaccggaagaatccgaacgtttcctggttgtcgccgcacaccaaggggaccgattgactgtcccggtagggagcgcactcggtgcgaagttggggtatcagtatgtgccgacttggaattatgattttagaacagtctttgaaagtgtaggtacgggaggtattacggcgacgtcgatccgtaaccagatcaagagtgctatggaggagtatccggccgtttgcggtgtgaaggccgagtcggaacttgacgggcagacagcaaagattcgggcgacggtaaggttccaacaggccggtaattataagatcgcctgtgtgcttaccgaaaatgatattcagaaaactaacaatgaaacgctacccgttttcaaccatgttctgcgggcggcacttacgaatatggaaggtgatccgatcgctcctgccgttgcggaagccggtgagcgcagtttcgatttcgaggtctccctgaataacggctgggattctcagaattgcgaatttgttatctacgtgttcaaggaagaggaggacgctgcctttgtcgtcaataacggggccgtatgtcccgtcggcgggaaagtcgattataaatatgagtccgtcaaatagtttcggttgtatatgggaagaaaacagaaaagccggggtgttctcggcttttctgttgcggatgctctgtcgcattccgaatatatgtaaaaaatcctcgaccgtgtggccgaggatataatcgctgctttagtgtaagcggtgttatttgaggtccttggctttgaggcggacgatttttccatcccggacaacgaccaattcgccatcttcttttttgactttttcaatcaaacgcttacgggcaagcaaaattccggcgttgattttctcctgcatctgcttgatctcaatttcgctcataatctgcaatcgttttataggataacgtatcttcgatatgggttgttatgtcttttcctcccaatgcgatgattctgatctgttcgtctgccgaactgttgtcgtagatcgcccaatagttgcaaaggggaatatagagagcggtcaaattctttatcccattggcatagcggcgacgaatcacatccgaaggaatattgtggcctccctctcgcacacgggtcgcgacgcgttcgatagcctgttcgggggtcggcaaccaaaaatagagcagcgtcacgaagtaaccttttgcttgcgcccgttctatgaactttacataagaacgcgtggacaatgtcgtttcaaaagcaaaatccgacccttcggacagcaggtcgtccattcgttgaagcatcaatcgtcctgcttcgatcgccacgctttccgggttgaacggcgacaggcctttcgctatttcatccgcattgacgaactccttgcagccgagcatttcgggcagtacggcataggatgcagtcgtctttcccgcaccgttgcagcccgctatgatatatagttttggcatatcgtacggacaaagatagctaattttacgattacaggctgttttactgtgataaaatgagacgaatcagccccaaaggtcaatttaggccttctgtcaaagtttgttcgttggtcgttctatgaattgtttcggatattgctcgttggagccagtcaacgggaaatgaaactctttttgtttgtcttctaacgatgtatcgccgaatataactgtatcgcttttgatatgagcttcgaaaagattgaggtatggttcatctgtgaatccaggccatttttgtaggtcctgtcagcttttttgaatggctttgattttcatttatttgcgtattgcgcaagcaatcgagggtagcagattcggggtacaataatatagcacaaacagcttttcaaccccttttcgctgtgcagaaacaaaaaaagccagcagttacatttctgtaaattgctgacttttcgagccgaaaccgagatttgaactcgggaccccttcattacgagtgaagtgctctaccgctgagctatttcggcaatagggagttttgtgaaaccctttcgggatgcaaatatcggaaaattttttgaataaaatcaaatggtaaggactatttcttggaaaaagtgcgattttttctctcattcttgctatcttcgccccgaaaatttcatatctccagggtttcggaggtcgtacggaccggaatccgaatcctcgggaagataaaaaattacgaggagttaatccgctaataaacaaaaccgtcatgcaagataaggctacgctcaatcctactccggatcagacattcgagatcgttggtcagggggcgtatgattttgtccgggttctgacccattccaaacagttgcagcgccagggccgggtcgaagaggcctgcaacgaacgctttcacgcctttcagcgcatttccgaattattgcccgaagacgaggaggtgattctcgaatgggaggatcccaatacgcgtgcggcgctcgaggtgattcacgcttcggcgatcgaccatttcctgatcaacgatttcgaaatgtccaccgccatgctcgaattgcttctcgaactggatcccgaagaccatctggaggcgattatcctattggcgttcaattacctggcaatggaggagtatgaacttttcgacgaggtgagcaacgatatttccgataaatacgcctgcaaggaggtattgaccatgtgggcggcttttcggcgcagcggccgtattcccgagggcgatgcgatccgtttcaggacccgattcgcaccctattttgccgaatttacctccgacgaacatcctgccgacgggcagtacctggaggatatcgagagcgagcgcccttcggtgcaggcccaggctcgtgagctgtggctccgcaccgaaaatctctggacgctttttcccgattttatcgcggcgcttcgaaggtagcccctcccgattttcttcggggcgaagttgccggcaagggcgcatatgccgtctatcgtgcgagttgttatgagaggagggcgatttgtgaggggatttccccgattttacgaatccgaccggcgtagttcgtcactcctttatccggtgtgtgcgagccttccggatctttttgcaagagatcgaatcgaagttttcgcccgatcggaagccgatgaatatcggggtaattaaaatgtgtatttgtaaaaaagaaacaccggacttcatagtccggtgccttgtttcttatccgatcgtatcgaccagtttgtagagcttgtcgccccggcggatgagttggacggttttgaccgagcaggtcgttccctggagtactgtttgcacggggtgctcgtccacaaagatttcatccccgtgctgttcgaccactccggtcgtttcgcccatccagagcagttcgtccccttcgtgtagaggagccgcttcgacgagcacctcggccaccgagatttttttgaagaaattggtcaccttgcccacatagactttgcgtttggtggcggccgatccgtggtggcggctgtgctccacgatcgggcgtcctgcgtagtatccctcccagaatccgcgattgaataccgttgccagccgctctttcagtgcggcggccagttccggcgtgtagtcgccgtcttccatggcccggagcgcccggtcgtaacattcgaccacgcgtttgacgtattccgcaccccgcgcacgcccttcgatcttgagaacccgcacgcccgattcgatgaagtagtcgagaaagtcgatcgtgcagaggtctttgggcgagaggatgtagttgccctcgacgtcgagtgtttcgcccgtttcggggtccgtaaccaggtatttgcgacggcagatctgccggcaggctccccggttggccgagaatccgtcgctggtgtggagcgacaggtagcatttgcccgatatggccatgcagagggcgccgtgggcgaacatttcgatccgtaccagctctccgccggggcccgtgatccgctgccgttcgatttcccggctgatacgggcgacctgcaccaggtccagttcccgggccaggaccactacgtccgcccattgggcgaagaaccggacggcttcgatgttggagatgttgctttgcgtggagatatgtacggccatgccgacgctgcgggcatattggatggcggccatatcggtggcgatgatggcgtccacgcccacctcgcaggcacggtcgatggtcgcgtgcagggtttcgatctcttcgtcgtaaatcaccgtattgaccgtcagatagcttttcacgccgtgttcacgggcgatcgaaacgatctgccccatatcttccagggtgaagttggcggcggattgggcccgcatattgagccttcccactccgaaataaacggagttggctccggcgtcgatcgctgcatgcagggattcgtaacttcctgcaggagccatgatctctatgtcgctgcgtttcattgggccgaggatttatttgttgcgtccgatcaggctgccggcgtactcccgcaggcgggccgtgccttccgactgtacggataacgtatcgagagtgttcaacgcccgctcgaagcggtggttgatctgctgttcggtcagacgggcgacgcccagtttgtcgaaaacctcccgcacgcgcgcgatcttctgctgatcggaaagagtcggatcggaataggtcgaagcgaggattcgatgctcggcggccgacgccttgctgagggccaggaccatcaggtaggtctttttgccttcgaggatgtcgcctccgatcgccttgcccagccgttcgtcgccgtaactgtccagcaggtcatcctgcaactggaacgccagtcccagttcggtggcgaaacgatagaggcgttgacagtcttcttcgcccgccccgccgatgatcgctccgatgacggtcgcacccgacagtagggccgaagttttgagttcgatcatgtggagatactcctcgaccgaaaccgactcccgggcttcgaaatccatatcgtattgttgtccttcgcagacttcgatggccatcgtattgaagcgggcgaggatctgcggcagcacttggggcgggtattcgctcaacaggcggtaggcgctgatgagcatcgcgtcgcccgacaggatggcgacgttctgtccccatttggcgaagacggaagggttgccccggcgcatcgccgcgttgtccatgatgtcgtcgtgcagcaacgtgaagttgtggaagacctcgacggctgccgctgccggcatggccgcctggggctggtcggagaagattccgcaggtgagcatcagcaacatgggacgcaaccgtttcccggtcatcgtgagggaataactgatcggtgcgtacaacctgccgggttcttcggggtatccgatttgtcccagataatgttcgatggcctccagaatttggtcgttgttttgcatgctgaaactcgctggataagaatcgttgaacttcgtcgtcattttctctgtccggcataattcgggcaagttcgttttgcctgtgcctggtggaaatactcccccaaaagtaggaaaaaaagtcgatagcgtgcaattattttctaactttgaccggattaacctgtaaaatttatcctttttatgaaaaaattggtcatcggcgtcgatatcggagggatcaatacggtcctcggtttggtcgatcgcacgggtgaagtctatgcgcgatcttcttttcgtacagcggagtacccttttttcgacgactatccggcttatgtcgaaatgctcgtacggacgctgcgggagctttgtgcggcgatgcctgccggggctgtactgtcgggtatcgggatcggtgctccgaatgccaactatcatacgggccggatcgagcgtccggtcaatctctggaagtttcgatccggagagccgaatccggaggaagggcggcggtttttctcgctttgcaaggaggtcggcaactcttttcccgggattcccgtccgtatcaccaacgacgccaatgccgccgctctcggggagatcgcttacggcaatgccgggggaatgcgggatttcatcatggtaacgcttggaaccgggttgggatcgggattcgttgccggcggtcggatgatctacgggcacgatggcatggccggagagctggggcatgtcgttgtcgaacccggaggacggcaatgcggctgcggacgccgtggctgtctggaaacctatgtttctgcgacgggtgccaaacggacggccttcgagttgatggcccgggaaacggtgccgagcgttttacgcgatgtaccttacgacaagttcgacgcccggataattaccgaagcggcgcaaaagggtgattcgctggcgctcgaggtttttcgctgtacggcggagaggctgggaagggcccttgcgaatgccgtagcgatcacctcgtccgaagccgtgttcttcttcggcggcttggcccaagccggggagctcctgttggaaccgacgcgccgttacctggaggagaatttgctgcctgtttaccggggcaacgtgaaggtgctgcccagcggcattccggctcaaaatgccgcgatcctcggcgcttccgctctgatctggaacgaatgattcttgcagggatcgttgcggattccaggtgtaaatatcgtcgcaaaccactctgtgacagaaagcgtccggccttgcaaggccggacgctttctgttgtctgtgtcggacgaagccttatttaccgcatcggcagctcgatcgagccgatcaggaacccgtcgcaatagatctgtacctggtaggtaccggcggtgaagccgctgccggtgtagaagataccgatgttgaggtcttcgttctggtaatccacgtcacgcgatgcggagtaagagaggcgttcgccctcgaattcgaacgtcggaacgctttcgctcgacagcacgtatccgtcgggcgacaggatgcggacgtagattgtcttttcgcccggagtcgccagggcgttggccgtgagggtgaaatccacgcgcagacgctcggcgttcttgatgcgcgacacctccttgctgcgggcgttgagcgctaccatgcggataccccgggcgttgataaccgatccctggcgtactttgttgttgagctcctgggccttctcttcggccatctcggcacgcatctgggccgtggtgatctccttgcggtaggatacgttttcgtcgatcagctttttgttgagcgtgttgagcgagtcgatctggtgaagataaccccgcatgatggtacgcagcgtgccgacctctttttcatattgcttgattttggccagactccacgaacgctcctgtttgagccgctgcatcagcgagtcggcccgctggcgttcgatgcccatctggagcgaaagggtgtcgttggagagttgcaggtcgtcgaaatcctgcatcaagtcgctcaagttgttctggatcgaatcgcggtcgatgaccaacaggtcgtagtcggcctgctgctggcggtgaatgttgtaatagaggaccgtgatggcagccaggatcaccgccaggatgatgatgacgatacggtagccgaggatcgacttgttcgcgcccttgcggggatcgtcgttttcgtattcgggttggttgtaaccttgatagttctcttccatggtgcgaatattttatacaaatataataaaagacggggcaatcgctgccggtttgtgtccgaaaatcgcagaacctcaccccatgttctgcaaatataatggatttttatttgattttactgctcaacggatatttcagtccgtgatatcccgaaatataggcctgaacgctgccgatgcggaccggcgattcgatgtagagaggaatgaggtttttgtcgtccgaaatccagaccgtgaactccgttccgtccgtaaacgagtacccttcggaggtgccgatctgacaggcgaacttcagggtgcggaacgtacccatactgcggattttcttggtttcacgccccagaaagcggtaccgcagatggcggatcgtatcttcgaggagcatttcgagcacctccgtttttccttcctggagcgttgccgggtcgatgctccgcaggtggaaatagagcgacacggggtccatgctgcgcggggtgagcgacatcgttttggttgtatcgcgcaccatgcggcgtccctgccaccgggtgtgtaccgtcatttcgggccagtcgtacacgtagttgctccagaaccggtagttgccttcgcggatatcgctttcgaaacggcgtgtcttcaactcctcgcgatcgaccagaatcgtatatttgtcgtccacgttcattacccagcggaaggcggggagcgttttgccgtgtgccacgatgcggtacatcggctctccttcatattcttcttcgacggtggtcacgcgtacgcttcccacttcggtattgggaaagaatttggccttgtagctggcccggtaatcgagtacttcgcccggctggtagagctgggcgccagcaggcagggctgccaggaaaaacaggacggtgaaaaaaatctgttttttcattgaaaagttgcaaaaaagtaatttactctgttttttacggctgttttatctgtttctgccgacgtgtttgcggatgaattgcggaaagttttcgattcgggctttacaatccgccggttcgggtcgtcgttccggggcggataaggtttgccttgtgcggaacttcttccggagtggttcaaataccctgccgtgcgaaaagctgcggaatcgttaaaatgcaggaaagcggtgtgtttcatcgtgccgaggtgaatgaatcaggatatttgggaaaaatcgatctcttcacggccggagtagcgcttgcggagttcccgaagcccctcgtggccgttttgggtcagtgtcgggtcggccgtcagcacttcggcggccgcttcccgggtgacggtcaggatctggctgtcgagcgtcgggttggcgatcttcaggtcgaaggccatgccgctctggagcgtaccgttcacgtcgcccgcaccccgcagcttgaggtccagctccgccaggcggaatccgtcgttggtttcgcacatcgcttcgagccgcaggcgggcctccttcgagagcttctcgcccgacatgaggatacaataggactgctggctgccccgtccaacgcggccgcgcaactggtgaagctgcgagaggccgaatcgttcggccgactcgatcaccatgaccgtagcattgggaacatcgacgccgacctcgatgaccgaagtggcgaccatgatattcgcctcgccgctcttgaactggcgcatcgactcctccttgtcttcgggtttcatcttgccgtggcagatcgtcgtgacgtattccggcagcgggaagtcgcgcgagatggcttcgtagccgtcctgcaaatctttgtagtccatcgtttcggactccttgataagcggatagacgacataaatctgtcttcccttcttgatctcctgccgcatgaaaccgaagagccgcaggcgggccgcgtcggtgtagtgcaccgtgcggatcggctgacgtcccggcggcagctcgtcgatcacagaaacgtccaggtcgccgtagagggtcatcgccaacgtgcggggaatgggcgtggcggtcatcaccaggatatggggcggttgctcgttcttcgtccagagccgtgcccgctgttcgacgccgaagcgatgctgttcgtcgatcaccacgaatcccaggttcgaaaactgtacccggtcttcgatcagggcgtgcgtgccgatcagcaggtcgatcgagccgtcggcaattccggcgagggcttcccgccgttcgcgtgctttggatgctccggtaaggatcgccacccgcacgtccattccttcgagcatcctctggaaggtggcgtagtgctggcgcgcgaggatttcggtcggagccatcatgcaggcctggaagccgttatcgacggccagcagcatggacatcaacgccacgagggtcttgccgctgcccacgtcgccttgcagcaggcggttcatctggtagccggagatcgtgtcctgccggatctccttgaccacgcgcttctgcgccccggtcagcgggaacggcagcctggtgttgaagaaggtattgaatacgcctcccactttggggaagaggaatccgttgtttttcgacaggcgggccgtgcggcgtgactggatacccagttgaatgccgagtagctcttcgaacttcagccggtattgcgcctgccgcagcagttcgggcgattgcgggaaatggatgttgtagagcgcatcgcgcagcgacagcaggccgtaccgggtccgcattcggtcgggcagcgtttcgcggatatgatcccgcaccatcggccagaggttgcagacgatcgtgtagatgcctttggtgccgaggacgctcgaaagccgctcggtcgaggagtaaatgccttgcagaccgctttcggccttgcgggaaaaggctttctcgatggtttcgatttcgggatgtaccaccgacagttcgcccttgaagaaggatgggcggccgaaaatcaggtattcgcgccccacttcgatccgtttttcgatccatttgattccctggaaccagaccagttcggccacgccgctgccgtcgttcacgacggccgtgaaacgtcgtttgcgccccgctccggcatagctgacgcctgtgatgcgcccccggaactggatgagtgcggaatccccttccgcgatctggtcgatgcggtagatcctcgtacggtcgatgtagcggaacggatagtggcagagcatatcgcccagcgtgcggatgcccagctccttttccagcagccgggcccgcgcctcgcctacgcccgcgacgaatttgatgtcgttgtcgagatagttcgccatatccgtcccaaatataggaattatcggtcaaatacgttctttgtctttgttctctatttgccgattttttcatccgtatgctttgtgaggggtagaatatctcaaatatatcctctcaacaagtgttttgaatgttgatataatttttatatctttgaaatgcttgttaatttataataattatgagaaatctattggtgttttttgtgtgtttggcaggaatttatagcagttatgcccaacagagaatagatgccctggagtttgtaaagaatgcgccttgggacttgacggagtccgaaatagacgagaaatataaggaaaacagtttcgaacttgcggattcattaaaagtatcgcttgctgcatcttcgggtggtaatttgaattttgcgaataaatttcttgatgaattttgcatcgggaaatataatggatttacattgtacaccataaacgaagagacaaggaaaccggatatgttttttacatatattcatccagaacagatagcgaataccgatgaaacggaactgctgcgatatatggattcgttattgtatgtaagattgggggaaccggatcataaacaggacgactattctgatgataatgggaattttgtgatgaggctttgggcaaaaggcacggatttgacagtagtgattactgcctctctgatgaaaattgtggagtcaccagaaactccattgatgtattttgtttctgttgctaaagcagacgatggatcaaacgattttagaaatgcaagatggggcgactctatgtcgcaaattgtagaaaaggagggacgtaaaaatgaatggacgggacagatacttaatccgaatgtttattcgttcagttcgagtgtggcgaataagttatgtgatgtcctctattttttcacttcagatgacaaattggttcgtgccaaatattattttacgaatatttcggtagatggttgcataagtgattacaaagaactggtatcactgctttctgaaaaatatggggttccgggagaatcagtgcattggagtgatccctcctatgcacggtatcgcacagaagagggttatgaggtgtattcgggacatttaagttattgggcatattggtctccgagttttcgtacggagattgtcatttctttaagaggagaggacggtttaatcaatttggccattgaatattcgagttgtatgcacgaacaagaggcgaaagaagatcgattgagaggtttgtaacggtatgagctatcagtattcttgatgcagaatttcttattacaggttttgcgtttaaggttaatggtatgtgggatatatataattattatggaagattacatcctgcgggagatcgacaagatcggcaaactcatcgaagcccttttgcagaaggcgggcatcctgcggagaagcggggcgggagaggccgtttgcgaaaccgcctggacggagttggcggaggcgctcgatctggatatcgacactctgctggcccgggaggactttatcggcgtgctgatccgcgagtatggcttcagcgacgagaacctggaaaaattcgccgagctgctgttcgatttcgcggccgcttcgcccgatcgggacgcgacggtccggctcgcctgcggcattacggccatttaccgctatctggacgaaaagaaggctccggtttccctgaaccgctactacatcctcaaggagttggagaatatgactgcccgatagcacggcgccgccgaacggtcgccattccggtttgtgcaggataaaacgcgaatgtctgttttatcctgccttcattttcactacctttgtggtaataaattctggcaggacatgaatttgaccaagtatgagcgccgcccgagccgtgaagtccgcatcggacgggttgtgatcggagggaatcgtccgatcgccgtgcagtcgatgaccaataccgacaccaaggataccgaagcctgcgtccggcagatcgaacgcattttccgggccggggggccgatcgtccggctgacggcccaggggcgtcgggagggagagaatttgcagcggatcgtccgccgtttgcgggaggaggggtgcgatgccgccgtcgttgcggacatccatttcgtgcccgaagtggctgcgatcgctgcgaaatacgtggataaggtgcgcatcaatcccggaaactataactcgtcgcacggggagtttgaagccctcatcgaccaatgccgggagcgcggcgtggcgatccgcatcggcgtgaatcacggttcgctttcgaagcgcgttttcgacgagtggggcgatactcccgaagggatggtagcctcggcgatggagttcctgcgcgtctgccgcgagaaggcgttcgatcaggtcgtggtgtcgatgaagtcgagcaatacgcgggtgatggtggccgcctaccggcttctggtggaagcgatggagcgggaagggatggattatccgctccacctgggcgtcaccgaagcggggaacgggatcgaggggcgcatcaagagcgctgtcggtatcggagcgcttttggcggacggtatcggcgatacgatccgcgtttcgctgaccgaagcgcccgagaacgagatccctgtggcgcagcttttggtcgatcattttgcccgccgcagcggggagttcgccgtcaaatattcggagcgttatacgccgacgcgatattgtcggcggagcgatatacaaactcccttgattcactccgagttgcctgccgactggcgggtgatcgaagccctgaccgagaatcctacggccgagctgcgggccgcgatcctgagcctcgaccgggccgacgaacccgttgcggtgtgctgccgttacgaggatccgacggtcgaagccgtcgccgtcaaagccgccgccgatctggggccgctctttctggacgggttggcggacggcattcggatcgacgcgccgcacctttcggaaaaggagatcgcggagatcgagctgatgatcctgcaggcggcccgcgtgcggatgtcccgcaccgaatacatcgcctgcccgagctgcggtcgtacgctttacgatatagagggaacgctcacggcgatccgtgcccgaacctcgcatcttaaaaacttgaaaatcggcgtgatggggtgtatcgtaaacggacccggcgagatggccgacgccgattacggctacgtgggcgccgctccggggcgtatcaccctttacaaggggcgcacggtggtggagaagaacatccctcaggaggaggcgctcgatcggctcgtggcgctcatcaaggccaacggcgattgggccgatcctgaaaattaaccggaacgaccatgacgattctgcctgcagcctatttggggtcggtcgaatatttcgcacacctgctgtgcgacgattgcgtcatcgacctcggggaacattttgtcaagcgttcggagcgcaatcgggcgcaaattctcgcttcgggcggcgtgatggacctcacggtgcacgtgcagcgtgccaaccgtccccgtacgccgatgcgggatgtgcggctcgactattcgaagcggtggcagcaccagcattggatttcgttggtgtcggcttaccggggatcgccctatttcgatcactaccgctcctcgttcgagcctttctatcggcgggaatacgattttctggtcgattacgacctcgaactgacggaagtgctgcttcaaaaactgaatgtgcagaaccgcccccgtatttcggagcaatacgtcgaagccgctcccggcgacctcgatctgaggcccaaacaaaaagaggacccggcgtttcatgccgagtcctatttccaggtcttttccgaccggctgcctttcgcgcctaatttgtcagtcgcagacctgctgtttgctgagggtcccgacgcggcggagctactaaggcgcagtttccggtaaggaacgtttcgtcgtataaatccccggctttcgcttctatcttcatccggccgttgagccgtaccgagtcgcagcggtagatgcacggtgcgtattgctcgaccgcgagcgtgtcgcccgagagggttacgaccggctctccggccgaagaatagacggttacggtctgcaagtcgccgttacgctcatcctcccggcgtccggtgatgtggagcgtcggttccgtgttgttccacaaagccttgtaaagatggaaagcgtccttgcggcggcgtcggtccagcgtgacgagccccgtagcctccacgccctgcggacggcgggccgagccgtagtcgaacagggtgttgatccaggttccccacagcagcgtgtcttgtgccaggtatttcgtgtaatcttcatgaaaacgagtctgccgtccttccggctgccagagcaggctgttcgagcggcgtcggcgagccggatcgccttgttgttcgatctgccccgcttcaccgtagcagatgcccgaacggagctggttccaccccgaccgaagctggccgagccagatttcgaggtcttccgtgcggcctttgtcccagccgatgttctgcgcccatacgatcaggtcggtgatctggttcagttctccgtcctggttgctggtggccgccgtcgggcggctgcggtccattttttttgccagttcgttcagtgtccgcacatagggcacggggttttcgccccgttgccagaggcagtcgaagagtccccagatgaccactgacggccggttgatatgctgggcgatgatttcgcgcagttgctggcgaccgttcgcctcgagttgcgggttcggataataggaaacgtcgctgaggaaaggtgcccggatcagcggcaagtcgatccagaccagtacgcctgtgcggtcgcagaggtcgtacagacagggggcgtgcggtcctgcgggcgagcgcagggcattggctcccaactcgcgtatgaaagcgaaatcttcggcatagtcctccgcctccatagcgctacccgtgcccggacggtcgtagtagagcgttacgccgtgaacccgaacgagcgagtcgttgaggcggaaaccctcttcgggtgtgacgcggatgttgcggaagcccgtggcaatttcgatctcatcgcgcgaggtgtcgctctcgacggatacccgcattcgatagaggttggggtgatcgaggtcccacagtcggggattttcgaccgtgaaggggatgacgacgggtttgccgtcgagtttggcctttatcgttttggctgcggcctgaattccgtccggatcgaacgcttcgagggtcacgcggcagaagttgtcgcctttcgagatgaggtggatttcggcctcggcttcggcccgttcggtcgatacggcccgagggtggatcaggactcccgacgagcccagatacagaggcgatacggcggtggagtcggtgacgatgagttctacctcccggctgatgccgccgtagatgttgtggatggacgagagcggcagcacgtcgcccgtaatggcgttgctcacggctacgcgaagcaggttttcgctgccgtatttcacccggtcggtgatttcgaagacgaaagcggtcgttccgccccggtgctcgccgacgtaagttccgtttacgaagaggtgggcgacgctctccacgccgtagaatttcaggaagagccgctttccggtccaggtctgcggtacgtagagtttgcgctgatagtcggcggtcgtgcgcaggtatgggatcgtcccggccagtgcatcgaggttccaggtgtgcggcagcgtgacacagcgggcgttgtcgctgctgttttcgtagcggaacgagaagagccagtcgtcgcagagcggatatacttcgcgggcctgcacactccaggcggcgatcagcagaaagatcagaagtaactttttcatttcgatatgtatttggccccgaaaggcattttccgtaaaaccgtattgttccggatcgctccgaaggaaccgggcggttccggagggttatcggaaacagtggcacaaagatacgaaacccggccgatattttaacctttccggacgaattaccgcatctcgttcccttttccgaggtcgatttataagcgctatctttaccgaacggccgaattatttcgtatttttgcggccggttgaaattgtcgatccatgagcgagaaatcgaaaggaaccctttgcggcatcgttgccgccgtgagttacgggatgaatcccctcggtgctttgtcactctaccgggcgggaataaacaccaattccgtgctgttttaccgctatgcgcttgccgccgtactgctggcagccctgttgttggtgcagaaaacttcgctgcgcattacgcgccgggagttctccgtgctgggattgctgggagtgatgttcgccgtatcgtcgctcacgttgttcatgagttttcactatatggatgcggggatcgcctccacccttcttttcgtctatccggtcatggtggccgtcatcatggcgattttcttcagggagcgaatttcgctggtcacggtcctctccatttccctggctctgtgcggaatcgcgttgctgtaccggggtgagggcggtgcggtgctcaatactgcgggcgttgtgctggtcatggcttcgtcgctctcgtatgcgctctatatcgtggtggtcaaccgtgcttcgttgaatatgtcgtcggtgaagcttacgttttacgtgctgttgttcggcgtggctgcgatcgtgttgtattcgctgtgttgtcccgaccagcctttgcagcttctctcgacaccctcgatgtgggggtgggcggcgatgctggctctgattcctacggtcgtttcgctggtgttgatgaccgttgccgtgcatgccatcggttctactccgaccgctgttatgggggctttggagccgctgacggcagtggtgatcggcgtgacgatcttcggtgaattgttcactgcgcggcttgctacgggtatcggcttgatcctgttggccgtcacccttatcgttgcgggcaaatccctgcatccggggcggctggcggcgattatcgggcaccgggggtttttacgccacagccggtaggctccggtgtggaataattctacattttgtagattcacgccacaggatcggcctcgtctgttgcaggcgtattatattgtgtatgattctcttatccggatagaacaggattggcgcagggtttgggtaaagtcctttaacccttttatggataaaaactacttatgaaatgaaaccgaatctgaaagagttgaatttggagaaactgaaaaaaatagcggccaaaacacctcgtattcgggtgaaactgactcgtaagcactggatcttcatcggctgtgccgtcgtggtgctggtcgttctgctcgtcgtgttgctgcgtccccggccgcaggccgccgcactgccggtggtggccgtcgaaccggtgcaggtcgaagatgtcagcatctatggcgagtacgtgggccgtatccgggcccagcaattcgtcgagatccgggcccgcgtcgaaggttatctggagaagatgctctttgccgagggaacctatattaagaagggccagacgcttttcatcatcgacccgacggtctatcgcgcccgtgcgaacaaggccaaggcgcagttgaacaaagcccgggcccaggctctgaaggccgagcgcgacctgaaccgtattcgtccgctgtatgagcagaatgccgccagtcagctcgacctggataacgccatcgcctcctacgagagcgctgtggcggacgtggtggtgagcgaagccgaccttacgcaggctgaaatgatactcggctacacgaccgtgcagtcgcccatttcgggttacatttccgagcggaacgccgatatcggtacgctcgtcggtcctggcggcaagtcgctgctggccaccgtggtaaagagcgatacggtgcgggtcgatttcagtatgaccgcgctggattacctgcgtagcaaggcccgtaacgtcaatctgggccataaggattcgacccgcaagtgggacccctatattacggtcacgttggccgacggggcgcagtatccctatcggggactggtcgatttcgccgatccgcaggtcgatccccagacgggtaccttctccgtgcgggccgagatgcccaatcccgaccatatcctgctccccggacagttcactaaggtcaaactgctgctcgacgtgctcgaacgggcggtcgtggttcccaagaaggccctgattatcgagaagggcggcgcctatgtcttcgtcgtgcgccgggacagcatcgtggagaagcgtttcgtggaaacgggtccggaaacgggcaataacttcatcgtcgaacgaggacttgcctcgtatgaaaatatcgtcgtcgaaggctatcacaagctgacgcacggcatgaaggtcgaacccgtggctcctcgtgaagaggaggcgaatccagaggaggagtagcccatgaaagccgactttttcatcgaccggccggtcttttccacggtactttccatcatcatcgtcatcgtcggcgccatcggcctcgcgctgctgcccgtcgatcagtatccgcagatcgtaccgcctgtggtgcgtgtttcggcgtcctatcccggtgccgacgcgcagaccgtgacacaggccgttgctacccccatcgagcaggagctgaacggtacgcccggcatgatctatatggagtcgtcgagctccaactcgggcggtttctccgcgaccgtcaccttcgatatttcggtcgatcccgatctggcggccgtggatgtccagaaccgcctgaagaaggccgaggcacgcctgccggccgaggtggtgcagaacggtatttcggtcgagaaacaggccgccagcaaactgatgaccatcacgctgctctcgtccgaccccaagttcgacgaaatatatttgagtaattacgccacgctcaacgtgctggacctgctgcgccgtattcccggcgtgggcagtatttcgaacgtcggcagccgctactacgccatgcagatctgggtgcagcccgacaagctggccgacctggggctgacggtcaaggatctgcaatccgcgttgaaggatcagaaccgcgagtcggcggccggcgtgctggggcaggctccgatgacgggcctcgacgtgacgatccccattacggcgcagggacgtttgtcgtcggtcagccagttcgaagatatcgtcatccgggccaatcccgacggttcgatcatccgcctgaaagacgtggcgcgcatttcgctcgaagcatcgtcctacaataccgaaagcggtatcaacggcggtaatgccgccgtgctggagatcaagatgcttccgggagccaatgcaatggaggtggccgaggcggtgaaggcccagatggaggagatcagccgcaattttccggagggtatttcttacgagattcctttcgatatgactacctacatttccgaatcaatccatcacgtctatcagacgcttttcgaagcgttgttgctggtgattctggtggtattcctttcgttgcagagctggcgggcgacgctcattccgatcgtggccgtgccgatctcgctcatcggtaccttcggcgtgatgctcgtgttcggcttctcgctcaatatgctgaccctgctgggtctgattcttgccatcggtatcgtggtcgatgacgcgatcgtcgtggtcgaaaacgtcgatcgcatcatgaacgaggaggggctttcgccctacgaagcgaccaagaaggcgatgcggagcctgagcggagcgttgatcgccatgtcgctggtgctgtgcgccgtgttcgtcccggtgagcttcctttcgggcattacggggcagctctatcgccagtttaccattacgatcgccgtatcggtaatcatctctacggtcgtggcgctgacgctcagccccgtgatgtgcgcctacctgttgaagcccgacagaggcggccggaagaaacggtttttccggtatatcaatttcggtcttgcgaaaggcaataagctctacggccgtatgatcggccgggcgctcgcccattcgcgccgtatgttcgccgccttcggcgtggtactcatcggtatctggttgatgaataaactcgtgcccgaaagtttcatgccgcaggaggatcaggggtatttcaccgtcgaactggaacttccggaaggggcgaccatcgagcgtacgcgtacggtgaccgaccgggcgatggcctttctgatgcaggatcccgatgtggagtatgtactcaacgtgacgggttcgagtcctcgtgtgggcagcaaccaggcccgcagccaactgacagtgatcctcaagtcctggaaggagcgggaatcggaggatatcagcgaagtgatgaaacgtgtgcgtgacgagttgtcgcgttatcccgaaagcaaggtctatctttcgacgcctgccgtcattcccggtctgggaacctcgggcggtttcgaaatggtgctcgaagctcgcggggatgccggctatgccgatctgcagcgggcggtggatacgttgatgcactatgccgagcagcggcccgagtttacggggctggcctcttcgatgcaagccgacattccgcagctttatttcgacgtggatcgcgacaaagcgcagttggtcggggtttcgatgtccgacatcttctctacgatgaaagcgttcacgggttcgatctacgtcaatgacttcaatatgttcaaccgtatataccgtgtatatattcaggccgacgcgccttatcgggcttaccgcgacaacctgaacctcttcttcgtacggggtgccgacggggcgatgattcccgtcacgtcgctcggtacaacgcactatacgacgggtgccggtacgatcaagcgtttcaatatgttcaacgctgcgaccatcacgggcgaagcggctcacggatacagttcgggacaggcgatggacgagctggaaaatatcgtgcgtgagaaattgcctgcgtcggtgggcgtcgagtggagcggcctttcttaccaggagaagcatgtgagtggacagacgggtcttgtgctggcgctggctttcctgttcgtcttcctcttcctcgccgcccagtacgagagctggtcggtgcccgtcgcggtcattctctcgctgcccgtagccggaatcggtgcctatctgggtatctgggtttgcggtttggaaaacaacatctattttcagatcggcctggtgatgctcgtaggtctggtggccaagaatgccattttgatcgtagagtttgccaaggaggaggtggaaaaaggccgcgacgtggtgtcggcggcactcaaggccgcacacctgcgtttccgcccgatcgtgatgacctcgctggcgttcatcctcggcctgctgccgctggtgttcgcatcgggtccggggtcggcgagccgtcagggtatcggtacgggcgtctttttcggtatgctggtagctatctctgtcggcatcgtcttcgtgcccttcttcttcgtgtggatttaccggattaaagcaaaactgaagaaacgatgaaacgagttgcgatatttgtcattttggctgcactgaccgtcggattctcttcctgttcggctgtgcggcactgtcaggcccccgaggtggagatgcccgggcagatcgcttcgggctataccgattcgctgaccatcgccgatctgagctggtggcagttttacggggattcgacgttgcgccgggtcatcgagctgaccttggaaaataacaaggatatgcttgcggcggcggctcgtgtggagcagatgcggcagttgtatcggataagcaaggccgagcgtttgccgaatttttcggccaaagggctggctgattacgaaacgaacgattatgccgacgaggagtcgagccgtgatccggagttcagtgccaagctctccgtcagttgggagctggacctttggggaaacctgcgctgggccaagcgcaagggcggggcggagtatctctcttcggtcgaggattggcgtgcgatgcgtatgactctcgtcgcggaagttgcgacggcctattttcagttgatggctttggataacgagctttccatcgtgcgtcgtacgctccgaacgcgcagcgagggtgtgcagcaggcgcagttgcggttcgagggcggtcttacctccgaaaccgtttaccagcaggccaaagtggaatacgcttcgacggcgaccctgattccggatctggagagcaggatcgaaattatggaaaacagtattgcattgcttatgggaaaatctcctgactgggaggtgttgcgcggtcaaatgaatatcgaagccgagtttccggacagtctgcctgtcggtctgccttcgggactgttgcagcggcgtcccgacgtacgggcttccgaacaacagttgcgttcggcgatggcttcggcggggatggcctatgcagatcgttttccccggctgaccttcaatctggtaggcggttgggagaacgatgcgttgcagggtttctttcgctccccgttctcgtatgtggccgctgcgatcgccgctccggtcttcggcttcggacgcaagcaggccaaatatcgtgcggcattggcggcatacgacgtagcccggctggggtacgagaagaaggtgctggaggttttcaaggaagccaacgatgcggtagtcacttaccgtaacgtccgcaaaacggccgcgttgaaggtcgctctgcgcgatgctgcccgcaaatacgtcgaactggccaatttgcagtaccggggcggcagtatcaattatatcgacgtgctggatgcccagcgccggtatttcgatgcccagatcggtttgagcaacgccgtacgggacgaacacctcgctttggtgcagctctacaaggcgttaggcggcgggtgggaactggaggaggaatagttttctgccgtcggatagcctgatctggtattaaaaatccggttctgaaggtttgtatgacagttttttgatttttgtcctgtaaatttccgggtgaaaattttgaggaataaaaaaaaccgtttatatttgcactccgaaataccactaatgcggaaatagctcagttggtagagcacaaccttgccaaggttggggtcgcgagttcgagtctcgttttccgctccaagcaaaaagctgataatcaaacgattatcagctttttcatttctgctgactgatgttacagaggccctttctgtgacacaaaataccctgaaatcgtggtttgtgatacagagtgtgatacataaaatcgtgtaacacacgaatcgcattttgttgcttgcgtaatccgtaaagattatgacaatcaacgttgtatgtcgcaaagacgctatcaacagaaaccatttagcccctcttgctcttgtttttacccatgaccgccgccgtaagttcgtaggattgggcatatccgttgcgctggagcattgggattttgagaaacaacaacctaccaccgactgccccgatggagcagaaatacagtttcaaatcacctccaaaatccgtgaatacgaaaagaaaatcaaaaagttggaggtgctggaaatccctgttacgttcgataatctttttgaacagaacggcaaacgaatcaactgcaccgtaggggactttttcaaacaggttatcgaacgcttggaaaaagttgaaaagtacggttccgccagcaaacataaggtaacacttgcccttatgtcgcaattccgctcggtcaatatgcactttgaggaattggatttgacttatttaagggaatttgaaatcttcctgcgtcaaaggggtaatgtcaataacagccttgctaccaagttcagcgtactgaaagcagtctataacaaggcggtttcagagggcgtattcgtgcctaaatcgaatcctttccagcaattcaaagtgggtagcctatggacgaatacccgcaagcgggccatcacgaaagaggacatccacaaactgattgagttggatttatcggacagggacttttacacccaacttgccaaagacatctttctgttctcttatttcatggctggaatcaatttcaaagacattgccctgctgacttatggagacatcgacaatggacgcatctactatgcaagacgcaagacgggtaagatgatgaactgctgtcttacggaacaggcacaggaaatcatcgacaagtaccacaccgaccaaatggaggaggactatatctttccaatcctcgaccgcaacgtacacacgaccgagaagcaaatcttagaacgtgttaagaaaacgttgaagcacatcaataaacgcctgcacgaattgagtgagaaaataggactgcatacgccattaacaacctatgtagcccgccatacttacgcaaccgtactcaaacggtcaggagtaagcgtagccttgatttccgaatcgctggggcactccgatttatccaccactcaaatctatttggattcgtttgagaacagccaaatagacgcagcgatgcagcacttgttataggagtttagaggtcggcggccaatatggtaaccgacctcctttttcctattattcgtatatcgtggcatcatcgaccgaggtattcgacaagattatctataattaattgctcgcgtgttaccaatcctttgggaggattcataataagtttagcctgttcgtctgttaattgctcgatcctttcctctatttgagcgtaaaatgccgtggggtctttcgcttcatgaccttggtctataatgtaccctatcaggtatttttttgccaagaaggtttcactgaatttctcttgtgctacccgataccagttgatgctccgttgataccatgcgctattctcgaatgctttgggtaattttttctcttttatggcatttacgaaatcgcgtggtttcagtgtgttctttccaagacaccactgcgagatagtcgagagaggataattcttacgtcgtaattccaacgcaaattcgaatacctcgttctctttcatttcaagtgccatgcagggtgcggccatatagtccgtgcctttccatgcggtggtacagatattcatttctgcaatcaatgccacgatggacatctctacattcaacggctctgcaatcacgaggttgtccaaattcatccccagtttcaagcaggccatcaaacggtgctgaccgtccagcacggcaaaataattttcggtctgttcgtctggaatatcatttccatccagatctaccaagtgccctcctgagaggtaaacatcttctcctttaactacggtgatgggcgacaattgcccatattctcggatggatttcactttggcagcaacagcctttgcgttgatttgacggttgcctttgacaaaggcgaaattacggttgagttctacggaagaaataactaactgcttcatattaatcggtgtgggtttacctccacccacgaggtcaaaatggttatttatataagtattaagtatttggtattagttatgcttgtttctcagcgttaggtctggctggtgagctcttgccagctctctggcggcggtcggatgttggcttgggcaaactcccatcatcgttgcgtcgttcgattcgaccctcggcctttcggttcggatgctccctcccaaccgagaagaggggtgtatgtcaaggagcgttcgtttgcgtttctgccgttaatacaatcgaaaatcatacataacacattgtggcacacaattattgtcggatagcagaaaagtgtattatttctgttaccccttaatttacagcataaaaaaggacggcttatcgccgtcccgttccatctaaacttagagattatcaatataaaccgctccctatggtatgccattcttcatccttgtatcgttgccagatagcttttatattttcatcattatcaagatatttcttattctctgtatagccgaacatatagacgatacgagagattaagagcataagattatatgaaacttgggtaggatttgtactgcgtttatcctcggccttgaattgctccagaaatggcagcagacacgcaacaacaaaggtaattttgtagcaatctttcaaattgatcgagaaatcgcccaagccaaactccacattgcgtgacagattggcatagagtgtggcggagttttctgccaaaagagcacccaacatctgtattgcctcttgtgattcgatggttacaccgtgttcacgcccccgccagatacgaattttggcatcgggattggcatggagatacttggcgaacgctcggaactggtcgaaagcaggtgcaggaatcgccattacgttctctgttttcttttgtgtaaggtaataaacaaagagcaatgccacccagaatttttcgatgtcgatgcccaatgcctgtaacgaacgaattactgacgtgttctccaagaactgctctttggtaaaagggaatttcgacatatccagttttccgtccttgtgtggtacgataaaatcccctgtacaagcggtatcgacttggtattcctttccatcctcctcaatttcgtatgtagggaacattcgattgccgatgctatgcacatattcataaatttccataaaacagatagtttaaggttattttcaaaggtagcgaattttcctgcaaaatttccttaaaaaataatgttaaaatatttgattatcgattaaattatttacatatttgcatatcaattcacagacaagggtaattcttgtttcttccatagagaatatgttattaggactgataaggacggcagatatgctgtccttgtctttgggcgatagtcgcatattttttgtgtgggaaatgaaattcccttataaaaagatatttcacacacagaaaaaatgcggtgaaatcctttaccacattttttgagtacgaatcaagtattctctataaaaagagtatttcagaatcagaaaatgtggaagattccaattaaagagatagtaggtttttgaatgacgggatagagagttgctcaaaactgtcctgtgcaaactgctcaaaagtgtcctatatatacaatacctacttatacactacctattaaagtcgtaccgaccatgtactaccacatcaaagaccgcaggtgattcgagaaccgcaaacaggccaaagaacattacggcgtagcctgcttccgaaaactgctacacttaaaagaaatcatatttacgaacaatcaaaattccattgctaacgatgaattatacagtaatccccaaatcaatcgtgaactttcagacgggcaacagtaagcctattgatatttacgtgtgagcaaccattaaatattgctccaatcacaagaccaacatatcccatataacagaggaaaaactatccttactgacggaattggatgaacggaccatacgacggagcattaaacggctgaaagacgcaggttatctaactgtgcataccaccattaaagaagatgcagacagaggttttataaagcgcaattcctactatataaagccagcaaacaaagactatttcttcctcgataatagtttctttaagaggaactatcccgccaagattgcagggtttctgctattattaaagtcggtatgccttaataatacggataccatccaatgacgcaacagccaaattgcaaagagtatcggtttatcaagaaatacgacaacagccctcattaaagagtgtctgcaattagggcttataaagcagattgcaaagggctatgaactaacggtagactgttttatcaattcctctgttaaaaagaccaatgcagggatttataaggagatatgcgatttctgcaaggtgaaaggcataaccgctcccaagtgggataaacgggctatgtccgtactgcttacaaagtataatgcaataggcttatcgagaacagagccaataagcataacctaccaactcgataaacgatgcaagaacctacccgaaaaggtatcattgccatactttattaagattctggatatgcaggagcaatataatgcagttatagaacaggtagagcaaaacaaactcgataaggaagaattcagagggtttgcattttagatatacagccctcatgcgcaagcatgagggttttcccttttaataggagaatgacatattttgcagattatttcatttatagggacttataaaattatgtcattcaattttctgttttctttttctctttagatggcgtgccgcaggcactcaatcaataaataagagtaacatatttcctttgttcaagataatattataattttgcaactacaatactccaagagtgttgcgtattgagaaacattttctaactttgtggtgctgtcccaaatgggcggtaacatattagtttagtgaaagtgtttcgctaatccttaacaggaaatctggaaaattttcgagtgcattaaggataacgcaacgctcgtcaccgtgtataggcatatatcattctcgatatattctattcggtgtggggtattgtttatttaatgcacgggtattccagaacctcctgttagataaacgaacaactccacacttgaaccgagaatgattatatactaatctgataatcaatttatatattagtatttatcttttatttgataccgtatagttcccatattctgtcggtttcccaaaggttattattattttgctccactgtctaataaaagctcttcattttgaggtatggtgttaatgttcgccaaagggttggttagaacaacccattggcgaactatgataaccttaacttaatgtactcggttcatgatcggggtattaagccgcaaagcattctataatgtccgattttctttaagaatttcggacattttattgctacatcaagagtaatatcgtatctttgcaagtggaatcattgtggatatgaagacgatactgacaaaggaaatacgaaacatcatagaccgaaacggaccgaacaggctttatatggtgagtgattttgcccatctgaataatgatgggctagttactcgtgcgctttcccgattagagaaagagggggtgctcattcgtctttctcaaggtctatatctatatccattacggaataagttcggtgtacttcgtccctctatagaagatatcgcatacgctatagcggaaaaggataaggctcgtattatacctagtggattgacagcattgaacaaattgggactttccacacaggtcacgatgaatgcagtctatttgacagatgccacagcaagggaacttactatcgggaaccgtaaaatcatattcaagcgtagcgcacctcgcaattttgcctacaagacagacttgttcccacttatagtcgctgccatgaaagaattagggaaagataacgtgacagatgaacagatcgcaatcataaaacaaaccattgaaaaatatggtagtcctgatgaaatcaaatacgattacagcattgctccgcaatggattaaacaaagacttgcattatgaattttactaagcttacaaaagaagaacaacttaccattttggctaatgtagccgaagataaagggattgtggacaatgccgtagaaaaggactactgggtcagtatggtgttacgtgccatattttctttgccgtatgcagcagcttttgttttcaagggaggaacaagccttagcaaaggttggggattaatagaacggttttcggaagatattgaccttgcaatagatccccaatatctcggctttacaaatattgagactaaaagtcaacggactaagttgcggaaagactccaagaagttcatagatggctctttcgcgctcgacgttgagaccagattaaaagagtttgggctatcagagagctgtaaggttatagttccagagacatctgtcagtgaccttgatcctgtagtcctgtttgtcgagtataattcagtgctgcaaacgaaaatgcaatatatacccgaacgagtcaaggttgagataagttgtcgttcactcatggaaccgtcagaagatgtgaaaatgcgttctatgatagaagaggcttatccaggtgaagagttctcattacctatattcactgttcctaccgtagtgccaggacgaacattcctggaaaaggtttttcttttacatgaagagtttaaccgtcccaatggctgtacgcatatcgaacgtatcacacgacacatgtatgacattgtaaagatgatggataaaccgtttgctatggaagcaatgcaggatgtacaattatacgaggacattgtgactcatcgtaaaaagtttacggcttggagtggattggactatacgagtcatcttccacacacaatatcgttcctgcctcctaaaagcatcgaagatgttttgcgtgacgactataagcagatgcaaattggcttcatctatgccaatgcaccttctttcgatgagattatggaacgattgagtgagttgcaaagcagatttaggacattggtatggaaaaataatcgttgacggtatggatagaataaatgttgatatgaccgaaactattatttttgattgataaagaatacaaaacatagttcaatatggcacatagtttcataaccaataaagatcgtctactctccgacattatcacgggtatcttgcccaaatcggatgccgtagatattcttgtgggctatttctatttttcgggatacatacagcttgccgataagctcgctgataagcatctccgtattttggttggtcttgacatagacactcggatttcaaatcgtgtccgtgaggtagaagagttggtggaatggcaacgcatccggagtaaggttcgtgaggaatatttcaacaacttagtgagactcattaatgaaacggataataccgatacagatgaaaccatccgaatatttcgtcaatttcaacataaaatttataatggcacattggaaatacgtaagaccgaagacccgtgtcatgcgaaaatgtacctttttgcttataatagcatcaataacgaaaatggagaacaacccggtgatgtaatcacaggatcaagtaatctttcctatcaaggtttgcaaggtagaacagaaatcaatgtacggtttacagacaaggggaaatatacggagggaaaacaaatctttgacgaactttggtcaaatgccattccaattgtggacgaaaacactgttgatcgttggaaagaaaaagtcgagagtaaaatttggattgaccgactctttcagccatataaactttatctacgtgtgctcagcgagtattttaacattccgtctaaaacaaatgtgcgtacacctttcgacattaccgatggaaagttcttcaacctgaaatatcaaactgatgccattcaacttgcattgaagtctatcgaaacccataacggaacgattgtagcagacgtagttggcttgggaaaaagtataatcgcttctaccattgcccacaacctccgtttgcgtactattgttatatcacccccacacttgaagtcaggatgggacgcttataaggacgagttcggtttcacaggcacagtattcagcagtggtaaaatttcggaagcattgacgcattacaatgatttgaagaaacctgatgaacagtttctgattatagtggacgaggcgcatcgctaccgcaatgaatacacagaagattacgccatgctgcacaatctttgtcaaggtaataaggtggtgttattgacagcaactccatttaacaacgaccctgccgacatctattccatgctgaaactctttcagatacctaccaagtccacacttaaaacagtggaaaatcttagtattgagtttcgcgatcttatcaaccagtacaaggaactgcgcgaattgcagcgtcaaggtaaactctccaagcaagacgtaaaaaacgaaaccgctaagatagctcgcacaattcgctctattatcgggcctttggttatccgccgttcacgcattgacctacagcagattgacacatataaagacgacctaaaaaagcaaaagattgaggtggttattccacaggaccctattgagttatcttatgacctcaaggaattgaaagacttgtatctgcgcacgcttaatctcatttatgggacaaaatcaaacgatgaagattcggacgatggcagttaccgctttcaagcagctcgttacaagccagtgctatatgtgccggaagataaacgtgaagcattggccaatgacatagaacgccaaacagggattgatgatgtaaatatgctcatcggtcgtcaagcaaacgtggcaaaattcatgcgccgtttgctggtgcgtcgcttcgaaagttcggttgcatctttcaaaacgtcgcttgcctttatgataaaatcttctcgtaatgtgctcgattggattgaccgtaccggaaagatccccgtttggaaaaaaggaggcatgcctgatgtggatgacttttacgaaagcactgatgatggcatggcggaaatagaagatgcgtttgagaaatattcaggcaagggattctttgttattgacatgaagtttgtcaagaacgagtttatcaatgacgtaaaagccgacatcgcacttcttgagtctatttacttggaatggtttggtaaggaaaatattatcaagttcgatccgaaactcgaatcgttcatccgccttgttcgtgagaaactatccaatgaaccaaatcgcaaacttgttgtattcagcgagttcgctgatactgccaactaccttggtgcggccctcaaagatgccggacttcctgcacttaaatatacttcagcggatgcaacgccttctatgcgccagactattcgcaataattttgacgcaagtgttaaaaaagaaatgcaagccaatgactacaaggtcttggttgccactgatgccatttccgagggttacaacttgcatcgagccggagcgatatttaactatgacattccatataatcccacaagggtgatccagcgtataggacgtatcaatcgtatcaacaaaaaggttttcgacaacctttatatttataattacttccccacagaggtaggcgaaagcgaaacccgcaccaaagaaatatctaccttaaaaatggcaatgattcatgccattatgggtgaagatactaaggcattaacttccgatgaagaatgttacgcttttttccgagaccgttaccgtgcggaaatcgagcattccgaaacggaatcgtgggacactcagtatcgccatcttttagaatcggtcaagggtactgatgaatacaatgaggctttgcagattccacaccgcgcccgaacagggcgcatcgtggataagccgctcaaaggtgtcatcctttttggtaaaaaaggcgaagatttcgtttttaaaatttccaatggcgactgtgagccgacaatgctttctgccgaagaagccttgaagctctttgaagctttacccgatgaaaagccgtttgctaccaccgaggacttcgaccgattgtatcaacaggtgaaacttttactattccgcagcgatacaaagagccgtaatgacaaaaacatcttaagggctattcaaaaacttaatgcaattaagataaaactgcctgaagattactattctgatcttttggcggctctcgatgcggaagcattgtctggctatgaagtgcgtttcatcaatcaaatgaaaccatcagagattcaaaaattattcaaagagattcctgccgactatcttatgcgcttgctcgaagcacaagccaaagtcggagaagggaacgaaacattaataataactgaagaactgcaataatgatggattttagcaaagcatataatcgtgcggattttgtcaattacctccgccgtgatttcctccccgatgattttgagcaggaagaaaagaatgtcccattttggacacagatgaactatgcatctgttgccacttgtcttggcaagtctaaaacgttagacctcgtggtctatgaaatcaaacaccattcgccccatgatgctcgcgtgggactgtcgaaagatgccttccgtatgcttgcaggagaaaaacaaaaccgagctttggttatcttcgttccagaagataactcggacaattaccgtttctcgctgattgaaatccaactctctatcggtgaaaatgacagtaatgttacccgtgcttattctaaccctcgtcgctattcttactatcttggcaagggaatcgcttgctatacgcccaataaatacttgaatgaactgggtagagtcgaggatgtgaaagatctttttgagcgtttctcggtagaggtacttaccaaggcattctatcaagaactgtcagattggtatgcttgggcaattaaggttatttcttttccaaacgatatctctacacaggcagatgataaacgccacaatcacgagggggtaatccgccttatcactcgattgatttttgtatggttcttgaaagagcgtaaacttattccgtggcagttcttcgatcaagagtatatagccaatcatcttattaagggtttcaatccgcataaaattgacaatcttttcggcaagtcggaagcaagtgtttattatcgcgctatcctgcaaaaccttttctttgcaatgcttaattgcccaattaccaaggagggaggtacggagtttacagaacgccgtttcaaggacaaccgctcgcagtttgacgataacaaactgatgcgctatcgtgatgagttcaatgatcctgacgagttcttgcgtctcgctaacgaaaccgtgccattcctcaatggcggacttttcgactgcttggatgaaaagcgtacgggaatgtactacgatggtttcagtgaacgtaaggagtcaatggcgcaactgattgtaccagactatcttttcttcggagaggaagcgggtaaaaacatagacctttcagaattctacggcgatgctaacaagaagaaagtgtcggctcgtggtatcattgacattctcaagcgttacaactttacagtagaggaaaatatgccatttgataaagatgtatcgctcgatccggaattgcttggtaaggtattcgagaacttgttagcttcatacaatccagaaacccaacaaacagcccgtaagcaaactggttcattctatactccacgagaaatagtgcagtatatggttgatgaaagccttgtcactcacctcaaacgcacggttggcaatgagttggagagtgaataccgcaagctacttgactatgcagataacgaaattttgcttaccgaacagcagaagttggcaattatgcagtctctctataactgtaagatactcgatcccgcttgtggttcaggagcattccctgttggtgtgcttcaacagatggtgcatattcttaagcaaattgatcccgataatagtcgttggaagaatatgctactacaattcgctattgatgaaacatctgaggcataccttaattcgactgctgaagaacgacgagaagctgttgctgatatagaaagagcttttgatgagaatgtaaactacccagactatgcccgtaaactccaccttattgaaaattgcatttatggtgtagatattcagcccattgccattcaaatttcaaaactccgcttttttatctcccttgtcatagaccagaaacggaataacaatcctgccgacaatttcggaattcgtccgttgcctaatttggaagccaaatttgttgcagcaaactcacttcttggtctaaaacggacggaagcatctttatttgactcagaagaaataaaacagaaagaacgtcaacttaaaattgctaaacataaaatatttagtgctagacgacctacaaccaaggaaaaatggcgcaatgaggtagttcgcttgcgtaaggagattgcggatctcttacttgaaaaagactgtatcggcaacgaacaagcagcccaacttgcacagtgggatatgttcgaccaaaatactttcgctcctttctttgatcccgaatggatgtttggtatcaaagagggctttgacattcttatcgccaatccaccttatatctctacaaaaggtgtttcaactgccgataagaaactattcgaagcggaatttggcttctctgatgatacatacaacctgttctttttcaaaggcttttccttgctttgtgagggaggatgtattacatacattactcctaagacattttggacaactcaaaccaagcgtaatttaagagatttactgcttgccaatacacttaattacgtgtttgatacagccaatccatttgaagctgtaatggttgacacttgcatcacctcggcagttaagaataagcctgccgcagaaaatctcgtgcgctttatggatggtcgtaagagtttattacagcccgaacgtctgaccgtagctcaatcagtatatctcaatactcagaacagtgtgatattcaaaccgtctgaattgaatatgcgtatctacgagctttatggcgaaaaggtcaaagctctgtatgataagtggtgggacaagattaagacttctcgtgaaatcgaaaagaataaacgcgaacttgaagaatatcgggcaagccttaaacctggtgatgttgcacttctcgggtgcttgaccgagggtggacaaggtttggctaccgccaataatggtaaatacattgcggtaagaagcaccactaaatgggcggagaacatccgtgtgtctcggcctaagaaacttgctgattttttggctcgaaccccgaaagctataaccgcagaaatgcgccgttacccatcatatgtagcttttttacaatcattgtcagaagctgaaattgcagaactctttgattctctcaaagagcaatatggtcgtgacattttcggtcaaggttatctttataagattgtggatgattgcgaaatagcagatgtggattctttgacaaatgatgaaaaagagaacggaatagaaaccactaagccgtactatgtgccttacgacaaaggagataaagacggtaatagatggtatttagagactccttttgctattgcatggtctaaagagaatgtccctttatttacaactggaatatgcttttccttgattagtcctgcgattctttcaactttctttttttcatcatctgtcagtttatcatatgggaagaactgaacaggaagagcatctactgacttatggttagcaacttgaatcaagaatgctttaaaagaatactctccgctctgcataatatctgtacttattgacgctctatatttatcaataaatcgagtaattttttgagcatctttgctcatttttatccccattgcaagagttctcgaagagggaaatagttgcaatgcaaaggacaaagactctcttaggcaataatcttcaccaaactctttctctacaatcttatcaaaatttagcaatagagcttggcactctgcgaaaatattagcatctaattctggtaagaatttatgctccaatttatttcttaatggaataaagagttcgatgtttttccttattgcacaatcttctcctttgaagtattcttttacacatgtggctaactcccaaaattgaatttctccatcaactcttttaaatcgtactttatttttttctcgataaaatggttttatcccccttttgaaaaatattgcatgaaacaatgatgtccatgcgatacacattaaaacaatgtacccacctgatttaaatttcacagcaggtttattatatgtttcaactgacaacaaagcagaatccaatgctttatccaaacataatttaacatttaaaggtaatcctctactcataatatatttttgcgtacaaataaatataatcaaaaaatgataaccagataggatatgaaactttatagctaactttcgttatccgaatccgcataaagttcacattgccggataacggtttcgagagcagcctcttgttcctctggtgggtatttgtactttttcaacaatcgcttcaccatagagcgcatcttggcacgggctgattctttctgtcgccaatcaatggtcttgctactacgcagggcttcagtcagttcttttgccatagcaacaagttggctgttttcatagaaatctcttacggcttgcggctttgtcaaagcatcatagaaagcctgttcttcctcggtcagtcccaattcagatgcttgtcccgcattggctttcagttcttgcgccattttgagaagctccttaatcacttcctcgttggagataagcccacggaggtattcagcaagccgggcatcaagcatttcactgaatttctcggcttcaaccattctttttttagcatatttcttgatgtgttcttcaagcagccgtttgagcaattcgagagcaaaattcttctctttcatctcggctatctctttcaggaaattctcatcaaagagtgaaaattccgagccttttgtattgagaatttccacaattccctctgccttgattgcaactttcaacagttgtgtgatgcgttcgtctataattttacgggtaattttattgtttcccgaaaggcgcaagagcaatgtccgtacagcttcaaaatatgcttcttcaaaacgttctgcaggggtgagcaaactgcggcaaagcgaagcagcctgtgacaagcgtttgctttcttccataaagacttttctcgcctcggcaggaacggcatccacaagaataatgttaccattttcatcagtttgagtggtaggttcggacgagacaaggttatccttatcaagcaacacgttcacaccacctctaatgaggttagcacgctgcagattggaacaatcggaaaaagaggaataatcgtaatcgttcatacattcccggcaacgcttgagtgcggcgacgaactgttgataggcggttgtcttgatgttcgggtcgccgtagtttttcttgtcacgtcctgtatagtcgtgcatggcctttttgagagccttggcaatgccgatgtagtccactactaaaccgccgctcttttcgggaaacacacggtttacacgggcgatagcctgcataagattatgtcctttcatcggcttgtaaacatacattgtggcaagcgatggaacatcaaagcctgtgagccacatatcgactacgatagcgatttttagcggtgaattgttatctttgaactggcgagccagttcttctttacgtgcggcagagccaatgatgtcgttccattctacagggtcttggtttccttgcgtcataactacgcagataatatctttccattgaggacgaagctccatcaactttttatatatgtctataccagtagcacggtcaatcgctactatcatggcttttccggtgagcaagtcggcacggttgttttcatagtgatttatgatgtccttgcaaagtgtgtcgatggtttgtggggctgaaagcaaggcgcgtagccgtgcattttcactctttgaacgtttgatgtcctgttcgtcagcaccttcttccgccagtttatcatactcgtcatccaacaatttgagcgtgtcctcgtccaaatccaattttaccaaacgactctcgtaatagacaggcacggtagcaccatcttccacggcttgggtcatgtcgtagatgtcaatgtagttgccaaacacctctctcgtgtcgttgtcgtcttgttcaataggcgtaccggtgaagccaataaaagccgcattgggcaggagtttgcgcacgatagccgcaaagccgagtttcagttctccagtttgtgtatcaatctttgtcttggtgtttgattgtgtgcggtgggcttcgtcgctaatcacaatcacatccgaacggctggtgatgagcttatcacggtctttgaacttttggatattggcaaagattatcccgtggctcttgcgcttttcgagcaattcatagaggttttcgccatcagtagctttgattggtttttggcgcaaatagtcgctgcacgatgcaaaagtgctgtgcagttggtcgttcaagtcaagacggtcggttagcacaagcaaggtcgcactaagcagatttttcaagagttggtgggcatagaacaccatcgaaaggctcttgcccgaaccttgtgtgtgccagaatacgccgatttttccatcattgcgttgcagggcttgtttggtacattcaagggctttcttcacggcaaaatactggtgatagccagcgagtatgcgtatcttcttatcgccacccattgtaagggtaaagttagcaattatatcaatgacccgatgcttctcaaatatgccgttgaagaatgtttcaaagtcggcaaacgccgtgctttcatagcttccatccgtggttttccattccatatatcggtcaagcggtgcggtaatcgtgcctactcgtgtgtctgccatatcacttatcacgagcatttggcaagcagtgaaaagttgcggaacaatgcgcatatagttctgcaactgttggtgggcttcctccgagttcgtcacttcacgggaaggggatttcaactcaacaacggagattggcagtccgttgatgaataccactatgtcggcacgtttggtggatttgccatttgtaaccgtccattggttggcaaccacaaaagaattgttgttgatattgtctgtgtcgattatcttgatatggtcgctacgcaatgagccttgagcggttttgaaggtcacatccagcccattttgcagccaatcggtgagggttatgtttgcacttaccaaaggttggctgaattgttctctgattttgcggatggcttcatccacggcggcgactttgtccgctccgtttatagccaacattgccttacgcaatgctcccggtatggtggaatcggtaagttccctgctggtatctgcgtcaagttccgggctataatggtattcatagcccatatccttgaacaatgagattatcgtttgttcgtatgaatcttctgtgaaatgaaacgtcttaggcataataggttggcattaaattatcatttatccggcggttcagcacgattttcatttcaatatcccagagcaatttgcttatttgattacgttgctccttacaagggcacatgaaagcatagtcttctatatttgctttcgttatcatcctaacagtagttcctgtttggcacgaccgtatgtgacgaatgtaggcaggggttttaagaagccaatatatatagtcgattggaaactcaggagatttgggaacaactttatagagatttgcgccaaaaaccattttcttccccttgaatttttgaggtacgatagctggcatacctaaaattggaagattgtcggattgttgccgtgtagctaaaactatatcaccagcttcaaccgaatacctttcgggaaattctcctgcgtaagggcgcattcctttttcaaggaataattcagaataagacacacagcccatgccaagcaataatgactctccttttccaagatactcccctttataggcaaagccactgacaatgcttagtatatctgacaatttgtattctttccactgttccataaatgagaatttagcagtttaaaactcattattccatatcggcaaacaagagtgctgcgtaaaataatcttgcaacaatagagcttcgattaatcctggaagatatttccgctcatctataatataccattcaataaatattttttgaatggtattatcttcattcattttcatacgcaaaaactcttctcgtttcatgccatcctgtttattattaagtctatctctcaatccttgcgttttataacacccattctgcaaaacagtaccactcttaccaatataaagtatatctccatcttctacattcctgtggaaaatatatacaccatatccacttggtatattttgagtctgcagctttaaagaatcttccaatctaaatctgcaatatccttttgttacatattctatatccatagtttgttttcctgttacaatccaaataaaattggatcaaagttttcggttaaatttgtttttatcttatttacagcgtattgcatttcttggtgaacttctcggccaaaggtcaaggcacgagagcctccgccggcctttgatcgagccggtgcggaggcacatcgtgcttaacacctttggctctctcgaaagccgagatttcagaacccgaaaaaatccttcgataaacagattttccttagcggtcagctctctgccgcatatcccttattagtttacaaaggccagaggagcagattattttaagcggacgttaacgccgcaacaactatgtagtattctctctgggaaaatccgtttaccggaagggtttctctatgacacgatactattgacatattcggtctgatgtttcagcacaaagaatagacggtttaccagtttgcgggcgacctttacgatagctttgctcttgggcatccgtttgcattgttccgtatagaacaggttcatcgcagggtcttgacgtaccgccacccatgccgcttctatcaggttacagcgcataacggcgtgttttcgtatggtaatatcccccgtcccatctttctctccgctggagtggcacatcgggatcattccgatataggcagccagttgttcggcattgcggaagcgggttatgtcgcatatctcggagaggaacgccattcccgtagcctgcccgaaccccggaacgctcataatcaaccgcagcggttcgcggaatcgatccgtcttggccaatgtccgtaaagcccgtgtcatctccagtttctgacggcgtaactcttccagatgccggatatgaatgtcgagggcctgacggccgctcggggtgagcgtctctatctccttcaaccaggcgaaaaagcgcttcgaccagttggaaaacggagtgagaaactcctgcggaatctcgatgcctaaataccgaagttgagacttgagccgattcttctgacgggtcgtgtctttggttatcgagttcttcaatcttatcaaggaacgcatctccaacgatacgctgtccggcgtataaatgcctttcagctcgttggctcttaaactccgcgccagcttaccgctgtccacggtgtcggtcttacgcagcttttcgctgctcttggtcggcacgtcggccggattgaccacgatgttgtcgatccctaaggccgtcagacgctcgtgtatccaaaatccgcagaagcccgcttcgtacaccgagtgatactcggcgcccggataactccgagttaaaaatccgtacaacgcttctgggctcggatgctggctaaacttcttcaatacggaggtttcggacaagaccgtaaccgaccaactcttcaaatggacgtcgattcctacataaatcttttgtcctctgaaactaattttgtttctttgctctctcatggctatcgtcgttttagttagtaaaggttttgcagctttaatctaaccaaaatctcgatagctttttcatttatccgctatcatcgcggcttaccctgattgtaaacatagggattatatttttatttcacccgacattagctttggtaaaagtgtatcacgggttactgtaagttgcatattcaatttttgcgtgttggtgatttgctcatatataggtgttacaattttattgtaatctgcgactttatccaagtctaaattaggaatatgaatatcaccgatatgtttaggatatatatgcggttgtgctgaacccgtttgagaatcaaagatattcttttggctgaattttagcaagttgtaccaaaaatatatatgtggagtaacggagctatctatataagatgaatcagcagaccaaacaggaacaccccacaatttaacatatcctgcatttgctccggaagctgatattgtaattacaggagcttttgtattcgcaacattatgatatgccgagggcgtaagacctcctgctactactggtacttcaccaccttttgcgtcagatgtaagaagattctttccacgcaacggaataaaataatcagatacagaggcatcatcgataacagcattatccacgaaccaagccttgaacaatgcttgcgcctgctgctctaaattatcatttatccggcggttcagctcgattttataatcaatagaggaaagaatctccgtaatacgtttctgttcttcaagaggaggtagttttaatgacaatctctttaaatcatcaatagtaatttgagattgagctgaaccagtatctaaataccttagatttgataatttgtatttatagtaaaaatatagtggctcgcatatcttattatccaattcaactgctatcgataaattcgttaggaaacaatcctcgctggaaattttaacatcgcctgttccacctacgccacgagcaaccacaatgatagttcctttgcgacaattataagttgttgcaaatcctacatttctatatccagaccaaattggatatgaaccgttattttgctttggaggtagtttcccatatttcatattggaaatatctcctaatttatattctttccactgttccataaatgagaatttagctattggtttgaccatctaatttagcttctatctccttgatggacggcattgtgccttccaccttttcgggatatagcttttcaagctcatattcggatattccgaggggctgactgcttgattcaagcgcatattgagccagagtgttgctcttttgtttgcaaataagcaatcctatcgtaggattgtcacgcccttctttgcggagaaggtgattgcaagccacaacataaccgcctaactgcccgacatcggcaaagtcaaactcgcctatcttaacctctaccaccacataacaggacagttttaggttataaaagagcaaatcgataaatttttctttttcagcaatttgcaagcgatactctttgcctacataagcaaagcctgtaccaagctccagcaaaaagtttgtgatgttggtaagcaatgcgtctttaagggcacgctcgttgtattttcctcgtaatttagtaaaagagaagttataagggtcacgtgttatttcctgcgctaaatcactgtctgtattaagaagtgtactcttgaaattggtctgcgctttgccgctgcgttcatacaggtctgttcccagcatattgagcaacatatccctgctccaaccattttccaaagtctggcggacatagaacagagccttgtcggactcgtccgagcatttgtcgattatatagcgatgatgcccccaaggtacagagaataaatccgattgcaatctttccacaagctgtggaagatttgcctttttagattcttccacaagttgtggcagaattgtaatctgttggttataaagcgagtaaaagcgttttgcgtagcggattgaggtttcagatagtccttcaacattgggtaactcatggcgcaagtcacggctcaatgtggcgtaaaacttactgccatacttgttgtccgcttgcttttcctcaatgtctttgccaagctcccaataaaaacggagcatttcattgtttacctttacagccgccttgatttggctactgcgataacgctttacgagttccttgacccatagcgtgtaatctttatctaatatgccgattgatttatccataaccttattatatttcgtttattgtcagttcgccagacatcagcttcgggagaagcgcatcgcgaatattctctaatttagtaatttccaatcgtctatcaatgatagattgaaacaacggatttattcgagcgttaatttccaacatattcagatttgtaggaatagcaacttctgcattttcaaggtcaccacgccttatatgccccattgttacagctttatcttttgcaatgagtttgaatttctttaaatgacggtttgtccaataataaacaaaccaccgtggatagtttttcaacggagtaactttaaataaatgttggtttaatccacatttacctccacaccaaacatcaaccataagagttccagaccatgagaatataatatcctcattgtctataatgtaatctgcatctatggaatccgaacagcggtcgctacaatcatcgcatttacgttgtcccaattcttttattttaagtactggtaaacttcgttcaatatcagttgccggaaatttctgcattgccaacccgtttagatagacggctatatcagtcaaacatcccataatagaatcttcaagatatatgcttccactgtcaaagtagtggtcgaacaatgcctgcgcctgctgctctaaattatcatttccacgcttatttttgggaaatgatgttcttctgccgtatgtcgaacaacaccacatgctaatttatgaatttacggtgtgagagttttacgttgctttgattaaccatagcatagtgcatggtcgtgtcaatcttgacatgaccaagcaaccgttgcacttgttcgacaggcatacctttgtcgatagccattgtagccaatgtgcgccggaacttatgaggatgaacacgtacaatcttagccgagcggccaagtttgcgcagacgtgtttccacgcccgaaatacccaaacgcttgtgcggcttagccaatgaaacaaagagtgccttatttcggtctttgcgagaagccaagtattgttgcagatgtatctttgcccgggcattaaagtaaacgatacgttccttgttccctttgccgaaaacaatacattcacgctcgttgaagttgatgtcctcacggttaagtttcaccaactcgcccacacgcataccagtggaagccaatatgtcaatgatggcaaggtcgcggatttcggtgcaactgtcacggagctgttcgatattctcatcgctcaatacctcttttacttgtgttccggtcttaaccttgtgtattctgcggacggggcttttgatgatgtaatcttcttcttcaagccaagcaaagaatgaagaaaatatccggcggatgttgtcgatagttacacggcttgacttgttcttccgctggaacacggcaagataggccctgatgtcctcggtggtgtaatctgttatctttttaggcatctttttgaacaactgccgaatggtagagccatagtatttgatagtcggagtggtgcagccctccacttgttttgcagacaagaagatgtcaagcagacggtcattcgacactgcattttcatgcaatgtctcgccgtcctcggtaatagtgtactggcttacaacctgaagcaatacgctattaaggtgagctacttgttcaaaacttaacacttctgccattgcggtgctgatttcttggattaatttctctttcatatcttcgttatttttgggtgaacataacgaagagtagaagttttttacttaacggtaaaaccaattcttgccaactgcttgcggatttcattttcaagtgtatgcgattgggcgaacaaatccgacagttcggaagtaagcctctccatcttctcttggaacggttcaccgtcatcctccacttccgcaatgccaacgtaacgaccgggagtaaggataaagtcttgcttttctatatcctcaatggttgcaattgcagagaagcctttttcagtttccagcgttccggcacggaactgttcaaaggtttctgcaatccgtccgatgtcattaccgtggtcttcggtttcttcaccacacgacagttcacggtgtgtacggtctttcatatagcccatgttgcgagcgtcaatgaaaagcgtcttgcccggttgagcctttttcttcgtcaagaaccaaaggcagcaaggtatctgcacattataaaacaactgcgacggcatagctacaatgccctctaccaaatctgcattgacaatgtttttgcggatttcgccctctgtgccttgctgtgaggaaagcgagccgttggcaagcactaatccgatgcgtccgttgtccgccaagtgataaagcatatgctgcatccaagcaaagttggcgttgccctccggcggtatgccatattgccagcgagggtcgtcacgcagttggtcgccgccccatttggaaatgttgaacggtggattagccatgacgaaatccgctttgaggaacggatgtttgtcatcgtggaatgaatcgccgaagctgtcgccaaagttagcctcaatgccacaaatggcaagattcatttgtgccaatttccatgtgttgctgttgagttcctgcccgtaaacagaaatttggttgatattacctcggtgacgttcgataaacttactactctgtacaaacatacctcccgaaccacaagccgggtcaaagatttttcctttgtagggttggataacctcaacaatggtgcggacaacacatgatggagtgtagaactcaccgcctttcttaccttcttcacgagcgaactctccaaggaagtattcatatacacgcccgagcacatcacgggcttctgttcctgtgaaatgcaggttgttttcaaaaatatcaattacattgcccaagcggcgtttgtcgagttctggacgggcatagtttttcgggagaatgcttttaagctgcctgttctcctgctccaacgcttccattgctgtatcaatgacaactcctatttcagcagtaagcgaagccttgacgattttatcccaacgggcatctgtaggaacaaaaaagatgttgtcaccgatatattcatcagggtcttcctcaaagccggcaccctctgctacaagttcatcgtgcttaactttgaagcagtcgttgatgtattttaagaatacaagtccgagcactacacttttgtattcggcagcatcaaggttgccgcgtaattcgtttgctgaatcccacaaagtttgctcgatggtcttctttgctacatcttttgtttttgccttttttgccatggtcgtatataaaagtaaaactccatcactatccctgcgaggcagaccaaagcctataagacagcgaaggagtttcgtatgttatttattcttattcttcaggtcattagcgcagttgctttttcagtcacaaaggtaatgccttttcgtggattttcttgtataattcaaaaaaagtgtatgtatgcacaaaatataaacactttgcgatgtaggtttggtgtctgcttatttcaagattgctcattagtattttggtaagattacttcagaaaaccacactaaattctataaatatactatatttgcgaaggcttgtataatgagccccaattaatgtggaacatagagcgcagatagcactggaatgtgaaagaacagcctatattgaagttccaagagagttaagaattaataaaagcgttaaatattcgcccttcagaatgtaccattaaagattaaggccatatttctgatttattacatacaagatattgagtaacaatcggttgtaaatactattgttgttcctctttggcaacagtaacttttgagaaaggctctcaactgaaaactatcggtggaggttattattcttcttcttattcttattattatggtgctttcttggactgcacggcattaacctcgattgaaatccctgcaagtgtagagacgatcgaagcaacggcattcaaggggtgttcttcattggcaacagtaacttttgagaaaggttcgcagctgaaaactatcggtggaggttattattatcattattattatggtgttttctcggattgtactgcattgaaatctattgaaatccctgcaagtgtagagacgatcgaagcgacagcattcaaaggctgttcttcattggcaacagtaacttttgagaaaggctctcaactgaaaactatcggtggtggttattattcttattcttcttcttattattatggcgctttctgccaattaaagaatctaatgaccgtcgatatgtctgcctgcacgcagattgagacgatcggtgaatgcgccttttatggggatttcgaactgcgattattcaagatcggcacagaaataccaccgacttgtgaaaactatgcttttagcggcataaatccttattcggtactgaaagtgccttcgggttgtgccgatgcctataaagccgcaacagaatggaagcggtttgcaagcactacaggattagatgaataaatgttaaacattagtctgcgatacttcggtattgcaaaggtgtattattcaatttgatatgattcagtcatttaagatggtctttgatgccaaccgtatttcaactcaaaaaattagagaaatcattgaagaattaacagaattgggagtatatgattctaaaacaggtatggtttcgtatgacaatgatgataaagttttagagcaaaagataattgcaattcttgacaatatagttcaaaaccattgattggtatttttaggacagacttgtgcaaaagggttaatatatagaccctctgcccaagtttgtcctttttatattacttgcatatttcataaattttttgtatatttacatcattatcaaagatttaatcacaacataaattttagctaaaatgaaaagaaaaacaccaagtattaattgaaaaacgggcacagagactatcgacgatgttcaaatatcgtatgtctccaaaggggtatcttatgataatatttacggcgtctgtctgttcgtaggacgtagaactgatgaccctacaccgcgagagtttcactatatctttgaactcgacatcgaccctgcaaaagatatgaccatctgttttcaaaaacgaggtcgttatatggcaggattctcctatctgctaaatccaaaagccgtagaggagggttgtctcgccattgtattgcccaacatggtagatattcccaagtccaattgtatgctcaatctttttgaagcccatataaagagcgatacggtcatattcgactatacgacaaaggagggcaaacagaacgtattcaaatttccactcacgggttttaacgagaaatatttagagcagtttatatagatataattaagaaatatgggattagtatataaagacctcatgggtaaaatggggatagatgatgagggtttatttgaacttgcctattgcgaattagattatatctctaatgaattgcaaaagatatataagtctccgtatataagtgatctgaatagctacatattattcgctattaggaaaatgttggattcttggcagtcaattcatctactatgtgaagataggatagatgtttcatctttggttacacttagtcgaatgattgtcgataactatactatattacatttcatccatattaactctaaaacgatagaagaaagagaattaagacattacttgtatgttttagatggggttgaaaatagaataaaggaactacgcaaatttccatccttgacttttgatctcaattatattgaacaaactgaaatagatcaactggcccaacaaattgaaacaactatgcagagtgatctaaaggcaaaagatcaattattgaaaaagattagaaataatccattatgtaatgttgatatggaaaatatcatccaaaggcgtaattggaaatacaaaaagttaaataatacgataaagggaaatagattttcatggctggaattatatcaacaagcaggaattaaaaatagtgtatctcaattcatatctggctatatgtctgaatttgtccacggactttgtatgtctaatattgcatataatactcctccttttgaaaaaggccaaatcttgaatattaacactgtatttatcaataaaacaacagatattatcaaaaagttattccaaaacgaccttgctaaaaacgatattgatattcgaaaatcagatatagcgacctcattgcttttaatggttactcctgaatatatttcagaaaaactattacaaattgcagataaaacaaaagcaacacaacattcttaaaaggagagaggaaagaaatttcctctttttttctgaaccgaggttggggtcggttgcagagaaatccaataaatgaatacgcttaattctctatcaactaataacataattgcttatgaatgacacgtgttaaatgctttatgtagcacaaggaatgaaattttacctaacaaattaagaatctgcaaattacaaacaatttgcaagcaagaaaatgtgatacagagtgtgttacagaccgatttttaaggtataaaacagctattttaacgcttgtaaataactgattatttgcaatttgcggaaatagctcagttggtagagcacaaccttgccaaggttggggtcgcgagttcgagtctcgttttccgctctgaaacgcagaggacaatcgaaaggttgtcctctgcgtttttcagtgtattgaggtccggacgaatgatcctgtatctcgtctttcgaggtgcgggagtatcaataaaagtttgcgaaattacctgtcgaagcgctggttcgaattctatttccttcttcataaaaagatggtttattattcgggagaagagttgatgctcctgcgtgattccaaatatattatcaggcgggatacggataagttcagagaatttttgaggaaatggagagtccgttgttcctgtttgacaaggcaatggaaagatttttggcaataaaagaaaaactcctgcttgtcaccgacaggcaggatataattggatccggggaaatattttgagggaccgaagccaaaagccttttattttccggcagataacggcgtctgtttcattctctttcgggaattatcgctctaaaaccgactgttggctttggccgaccaatttcccgtttcggtattcggtcggagaaatcccgacatactgcttgaaatatttgccgaagaaggattgggtcgagaagttcagttcggaagctatctccttgatacttaagtctgaggaacgaagcatctgtttggcgtcggcaatgaccatgcgaatgatccactgcagggccgagatgcccgatttctctttgatgatcgccgaaaaatagcggggtgtcagatattgttcctgggcgtagtaggttacctcccgttccgtgcggtgattctggtagagtgaaaccatgaaattctgaagtacatggtttttccgatctttgtgctgcggttgctggggatggcgtgcaaaatagatactcagtatctcgtagcagagtacctcgcccatcgcggtcaccaattcgcggttgatgatcttttgttgtgtattggtggctgcagagctcattgtcgcaattcgcctccgcagtgcatcgatcagttggtcgatatacatgtattgttctttcgacaacgacaggcaggggttttcatagatgaaaaaactccaggtcggatcgaatgtctttttcgtattggtcaggatgtaatctatatcgaccgtaagcacgactcctttcaaatccttgcttcgatgttttatctgaatggacatgagaagcggagagatatatatgtcgccttgacggatatggtatgttttatcttccagaatgatgtcgagttcaccgccctggcagaggaaaaggctgcacttatccgtttgcgagaaagtataatcttcttccttgtcggaagcgagcggaggaacagtagaaaattttactggaattgtcatggttacggttttttataatttggccgaaaaatagggaaaagggatataaagtacaaatattcaggaggaatccgttcgataattctacaaataggatagtggacaaatggaatgaatagttcgattcatcgcccttgaacggagttgtagccgtgtttcgagccggaaagagtgttttttcgataatcgtccgtgtcaaaggattttcggttttcacttcgttcgacggatggagtgcaagcggaacgaccggaggcagcccatacagaagggctgcctccggtcgtcggaaggagatgttacgggaggaggtttttcagaaagcgacggatggccgcccatactcctgttttgcggaacactacggtcaggagtattccgagtgcgatgccggtaaagagcgtgcgaaacagattgccggaagatttttttcgggtcgtcgaggcgtgtgtttcacgcaggagggtcgtatcgcgggcgaaggaggaaaggtttcgcagaccggtatggcttgcgaggctgtccgattgccgctgccgccggaaagtctggtttgtcagcagccatgtacgccgttccgctcggtcgcttataccggtgacgatgagcgaatcgtcctgtttttcggctcggatcgcggcccgtccgctgcgggcggtgtaggccgcacccgggggaagatggtcgaggtctttaagcgggatcgccagccgggtccggtccgtcggcagggattcggtcgcaatcagcagggttcgtgatgtcgagtcggactcctgttgccgttgccgtagttgtcgtgcgaggctgtcgcgttgcgatttttcgacgcttcgttccgaatgtattcgggtctgtatgtccgaggtctgcgtcgtggtgcgggtcgtcgcacatccggctgccgtcaggagtagcagcggcagcagcacgggccggttttttcgtcggggaggtttcatcggtttttttgggggttttgcggttgaagtttttgcggagcccttcgacttcgcgggtgagtttgtcgattttgcggagcagttcctgttgggcgaccagccagtcggccttttcccggcgcagggtgacgttctcctgcagtacgtcgttgtacttttcgcacaacaggtcgatcgagcgctgcatgtcggccagcatgtcgttgcggcgcttgcggcggctgaccagccaggtgacggctccggccaggaagccgctcggcagggcataggtcagcaggtcggtgataagtgtcgggttcatttcggtagttcgtgtcgaatggggttagagaatgccggtttcccggagccatgcctgcacgtcgaacgacgggcaggctttggctgccagttcgttatgccctacgacggctgcgccgggaaaccgggcgacgaaatcccggacgtagtgttcgagggcgcttttctgctgcggagtgcgggtgtcgcagggggtcgtgccgtcggcggcgactcctccggcgtatgcgatgtgacggctggtggcgttgtaaccacgggcgccgttggtgatctcccagggatcgaccgtgcggtcttcgttgttggggacgagccgttcgacgctgccgtccaggtggatgaggtcggtataacccacctggcgccagcctcggccgccctgggaaacgggggcggtgtgccacctgcggatatcggcggcactcacttcgcggccgggcggcgtggccgtgcagtggatgacgagtctttcgagttttgccataataaaaaagtgtggaagaggttggaatcggggcgacgaccggattcggacggggtggataagctccggccgagggtgcgggagaaggtaggccgtttcggattgggtcggcgaagcgcaggacttcggggcgggatgccggtttccgcttttccgggaaaagcggggagggggccgatggatgcctgcaaagataacggatgccgtcccggaatacaaatcggagggacatcctgcggtttttcggcggcatgatgtcggtttattccgttgcgatgcggcggatttccggtttttcggattatctttgaaacggttcgggctatgaaacttccgcaatgcacgtttgttgttcgatatgaaacgtaaaataattcgcagtatgatcgttttccttgcagttgcggccctgctggtcgcggcgatcgccctttttatgaatcggcccgaattcgggcgtgctccgcgcggggagcggctggaacggatccggcgttcgcccaattaccgcgacggcgctttccgcaaccggcatgcgacgccgcagctcacatcgggaaagggctggtgggctacgatgtacgacttccttttcgagcgtcaggagcgcaaccgtcccgatcatgcgctgcctgcagtgaagaccgacctgaaagcgctcgatccgaaagagaacctgctggtctggttcggccactcctcctacctgattcaggcagacgggctgcgtattctggtcgatcccgttttcgaaacggcttcgcccttgccgtttttcaacagacctttcgaggggaccgatctctataaacccgaggatatgcctgggatcgacctgctggtcatcacacacgaccattgggaccatctcgactacggcacggtaacgaagctgcgcgaccgcacgggccgcgtcgtctgcccgctgggtgtgggcgagtatttcgaatattggagtttcgatccgcagcggatcacggagcttgactggggcgaacaggttgcgctcggcggcggttttacggtatattgccgtcccgcgaggcacttttccggacgtacgtttcgggcgaaccggacgctgtgggcttcgttcgtcgtcgaaactccgtcgcagcggattttcctcggcggcgacggcgggtacgatacccatttcgccgacgtcgcacgcgagtttccgaatctggatgtcgccgtgctcgaagacggccagtacagcgaggattggcgctatatccacatgcttccggccgatctgaagcgggccgtagaggacctcggcgcccggcgggtttttccggtgcacaattccaaatacgctctggcgcggcatccctgggacgagccgctgaacaatgcggctgcactcgcggcggagaatcccgaggcggggatcgtgctgccgcgaatcggcgagccggtacgtttggatcggtccgacacgctgccgggcaggtggtggacagctcccgaaaattgaaagagagcgaaggctaatcttcgctctctttttttatctttctccggtattcccggcgctattttttgccctgattggctacggcttccatcagcttgcggatctgttcgggatcgcccagaaagtaatctttcaccagacgtaacttgtcgtcgaattcgaagacgtatggcacggccgtcgggaggttgagttccgagatcgccgcgtcggagatgcctttcaggtgtttgatgataccccgcaggctgttgccgtgcgctaccaccaggattgcgtcgtgaacggacagttcggggaaaatcacgcattgccagtagggcagcgcccgttcgatggtttgcttgagcgattcggtgcggggcagctcctcgtccgggatcccggcgtagcggggatcgaagcgcggattgcggggatcgtcttcggccagcggatcgggtgcgacgtcgtagctgcgccgccagatgtgcacctgctcttcgccgaagcgggccgccgtttcgctcttgttgagcccttgcagtacgccgtaatgtttttcgttgaggcgccagtttttctcgacggggatccattcctggtcgagccggtcgagaacacagttcagggtccggacggcccttttcaggtaggaggtgtaggctttgccgaaacggaatctttcggctttgagcaattctccggctttgagggcctcttcgacgcctttgtccgtgagatcgacgtccgtccatcccgtgaagcggttttcgcggttccacgcgctttcgccgtgccgcagcagtacgatttttttcatggtatgatctgtttttatttgtatttcacttcgttgagacactctccgcgtgagaatgcctggatgttttcgagggtcgtgcgggcgatgttgtccagcgcctcgcgggtgaagaatccctggtgggaggtgaggatcacgttgttgaaggagagcaggcgtgccagcatgtcgtcgtccatgatccggtcggaggtgtcctgatagaagtaatccgcctcttcctcatagacatccagccccgccgctccgatctttttctccttgagtccttcgatcaggtcgctcgtgcggatcagctgcccgcgtcccgtgttgatgatgatgaccccgtctttcatttgaccgatggcttcggcgtcgatcatgtggagggttcggtccgtgaggggacagtgcagcgagatgatgtccgagcggcggtagagttcggtcagcggaacgtaggtcatacccgattcccgggcgaacgcctcgtcggggcaggggtcgtagccgagaacctccatcccgaatccccacaggatgcggatgagggcacgggcgatttttcccgtgccgacgatgccggccgttttgccgtgcatgtcgaatccgaggaggccgtgcagggcgaaatttccgtcccgggtacgccagtaggcgcggtgtaccttgcggttgagcgagagcatcagtgccacggcgtgttcggccacggcatagggcgaataggccggtacccggactaccgtgatgccgtgctcggcggcggctttcagatcgacattgttgaaacccgcgcagcgcagggcgatcaaccgtacgcccatgcgggccagttccccgacggttggggcatccgccgagtcattgacgaagatgcagaccgcatcggcgccttgtgccaggggtacgttgtcgatgttcaggtggctgcggtggtatttgatccgtatcccgtagtcggcgttgatccggtcgaacgattcgcggtcgtagggctgtgtcccgaaaaaaatggttttcatggcgtatatttcatttaattataacgtttttgtcgaggcggtattatccgttccgttcacggattgtgccaagagcgggagatttgccgcacaaaccgtatcgaaagcaatacgtccttcgttcggttcggatttcgaagcactctgtctcatggcactttttttgtcccgtttgtttcctgaataaacatgcaatgaggaatccgagagaacgcatacgcaacagtagggggtataaatggtggattttgagcctcgtgatgctcgggactttcatggccgtgatggacgtgacggtcgtgaacgtcggcctgccgaccattatgtcggtatttcacatccccatttcgaccgccgaatgggtcattacggcctataatgattaccatgacgctcatgctgccttcggcgggttggattgccgaccgcatcggcaacaaacggatgtatattctggggttggtgctcttcaccttcggatcgtggctctgcggccgcgccgggagcgatatgttcctgatttcggcccgtgccctgcaaggcttcggcagcggcatcatccaatcgctcggcctggcgatcgttacccgggagtttcctccgcaacagcgggggctggccctggggttgtggtcggtggcggccgccgcttcgatctcgttcggtcctctgatcggcggttatctggtggacgattacagttggcacctgatcttcgatgtcaatgttcctgtgggactggcggccattctgtttgcaatttttatccagaaggagtggcgcggtgcccgtgcgggcagtttcgattggccgggtttcctgtgcgtggtctgtttcatgccccttttgatcttcgcactggcccgaggcaattcgccttcgaatcccgaggggtggagttcgccggaggtgatcggatgttttgcggttgcggctgcggcactcattgtctttatcgtccgggagctgcggtgcgaaaatccgctgttgaatctgaaactgctcggcgaacgtaatttcggcgtttcgatggccgtgctggcgatcttcggtatcggcatgctgggcggtacctacctgctgccgctttacatgcagaaggggctgggctatacggcgatcatggccggcagcgttttcctgcccgtcggcctgatccagggcgtgctttcgacctgctcgggattcctgacccgctatatcaagccgctctttatcgccgtgaccggcatcctggtcatgacgttgagtttctatttcgccagccggtttactcttcatactacgcatgcacaaatcatgttggtactctatctgcgcggtttcggcatgggactgacctttgccccgctgaacgatttctcgctcatgaatttgagccagcgcgatatggcttcggcggccggcatctccaacagcatcaaacaactctcgggcagcgtcagcatcgccctgcttaccgttattctgaccggccgtacggcgttccattcggcgcagggcggactctcttcggcggaaagctacgtggccggtatctccgatgatttccttttcgtcacattcgtttcgttggcctcggcactgcccttcctgtggctgttgcgcccgcgccgcaaggcggcttcgtttaagagcgaaggaacgggcacctgacgggtttgcttttatcgccttgaatccctatttttgtccgggggaatcgtcttttcccggaggattttgaaaaacgatcagcagacatacgtccccgatcccgaggtcgcttcgcggctcctggagtggtacggccgcgaggggcgcgaccttccctggcgtcgcacacgggacccttaccggatctggatttcggaagtgatcctgcaacagacccgcgtggcgcagggtatgtcctattatcatcgtttcctcgaactgttccttgacgtcgcggctctcgcttcggctcccgaagatctggttctcaagtgctggcagggactcggctactactcccgcgcccggaatctgctggccgcagcccggcggatcgtggaaacgcacggcggtgttttcccgacggactatgccgacgtgcgggcattgcccggcgtgggcgactatacggctgcggcgatctgttcgatcgcctacgacgaaccctgtgccgcactcgacggcaatgtctttcgggtgctttcccgcctttacgacctcgatacgcccatcgatacgacttccggaaggcggacgttcgctgcgttggccgattcgctgatcgaccggcagcggccgggactttacaaccaggccattatggatttcggggctctttgctgtcttccggtacagccccgctgtacggagtgccctttgcgcgaccgttgtctggcttttgccgcccgtacggtcgatgtccgtcccgtcaaacaggggcgtacggctgtcgaaccccgctatttcaactacctgcacgtcgaatgcggcgatgaattggtgttgcgccgacggggtgccggcgacatttggcaggggttgtacgaatttccgctcatcgaaactcccgaacctgtggaatatacggtgttggccgcgatgccggagttttgcgctctcttcaaagataccgggacggtatgccttgttgggaccgtcacgatgcccgtgcatcaactttcgcaccgggcgatccacgctgttttctaccggatcgtcgtggagcgctggacgccctccttgcgcgaaatgctcgttattccgcgtgaaatcctcggcgattacgccgtttcccgtcttacggagcgttatttatcccgttaattcttcgtctggactctttgcggcacacggtttgccgtttgatcgacgtgaaacctaacgaagaaaacgagataaattatgtttacaggtgtacaattcacgcacttcattcaggcgaatccggcgctggccgtctttctgaccgttgcgctggggtttttgctgggtaagctgcgcatccgcagcttttcgctcggaacggtgaccagcgtgctgctggtgggcgtagtcgtcgggcagcttcgtatcgagattcccgaaccggccaaaacccttttcttcctgatgttcctcttcgccgtgggatatgcggtcggcccgcagttcttccgggggttgaagaaggacggattgccgcaggtggccttcgccgtggtggtctgtttgctgtgtttggggtcggtatggctcttctcctggctgatgggctatacgctttcgcaggctgcggggctgctggccgggtcgcagacgatgtcggccgtgctgggcgtggcgaccgatacgatccgcgaactgccgggcggagcggaaaccgatctcagttcaatgcccgtttgttatgcggtaacttacatcttcggtacggcgggttccgcatgggtgttgagttcgatcggaccccggctgctgggcggcgtggcgaaggtgaagcagtcggcgcgtgatctggagcagaagatgggcgaagacctcagcctgaaggccggcttcgacccggcggcccgggagatcgttttccgggttttcagcgccgataacgaatggttcgagggcgggcgtaccgtccacgaattcgaaaccgtcatgcagcgcgacggaaagcgtattttcgtcgaacggctctgtcagcaggggaagattgtcgatgaggtgacaccccggacggtgatccgcccgggcgatcaactggtcgtcagcggccgccgcgaatacgtcatcagcgaagagaagtggatcggtgccgaagtgtccgatacgacactgacgaattttgccgttcaggtccttcctgtcgtggtcaatcgcaagggggctgccggggagaggatcggaaaggtcttgtctgctaaattcatgcacggggtcaatatccggtccatcgtgcgggcgggtgtgaagatccccgtgcggagcggtgcgaaactggatgccggcgaccggatcgaattggtcgggctgccgcaggacgtgcgacgtgccgccgcacagttgggtttcagcgatccggtgaagaccgagagcagcgttccgttgctggggctgggtatctgtctgggcggtctgatcttcggatggatgctggtggccaagataggggcgattcccctgagtctgaccgtgagcggcggcgtgctgctcgcaggtcttttctgcggctgggcccgttcgcggcgcccgactttgggaggcattcccgaacagaccgtgtggttcatgaacaatatgggactgaatactttcattgcgatcgtcggcatttcgaccggaccgtcgttcgtcgccggttttcagcaggtgggctggagccttttcctggtgggggccggtgccacgactcttcctctggtgctgggcgtgttgatcggccgttacctgttccgtttcaacgatgccctgacgctcggatgcgtcgccggagcgcgaacgactacggcggctctcggtgctgtcgaggatacgatcggcagcaatgtcccctcgctgggatataccatcacttatgccatcggtaatacgctgctcatcatctggggcgtggtgctcgtgttgctgttggcctgacggagccggtcgatgattcgggcgggtctatggttttccatagatccgctttttcgtggtgtgaatcgctaaaagcggatgaatccggcggatttttgaaaaaaaattgattacttagcattctcttttaacgattgcgacgatgagtgcgaaactggcgaagtacgaccggttgtacgaacagatcaagggctatgtacagacgaccgacgacatttgggcacggctggccacgatggaggccgtgctgcatcataagatgcagacttttttctggacaggggtgtatgcccttatcgacgacgaactgattgtccgctcgtaccaggggcccgttgcctgtcagaagctgcggcatcatacgggagtttgctgggcggcggtcagcacgggagaaaccgtaatcgtgcccgatgtggagcggtttccgggacatatcgcctgtaattcgaaatcccgcagcgagatcgtcctgccgattcgggaccgggaagggcgtgtgttcgcctgtctggatgtggacagcgaccggttggatgcgttcgaccgggaggatgaagaggggctgaaaaagattctctccctgctttttgattaggcggcgctcctgcgtgggcggcgtatcgtatcttcatcatccgcgaaatccggtgcgtttttcagcgattgccgtataaaataaactccgccgaagcggagtccgagcagattcggcgctgcgtcggctcgattatttttgtaccggacaggaggcggttcggcgatctttatgtgcgagtccgtacgattgaattgttcgcctttttctgatccttgtacaaaaaaatcccgctgtattttacagcgggatttttttgtatttggcatttagcggattaccgttacgcggttctcctgttcggtcttgaacggagatttggtgtcgctgtaacccttgtactgcaggttctcggcttttacgcctttcgagatcaggtagtcgtaaaccttcttcgcacgctgctcggccaggcgggtattcacggctttcgaaccggtttggggatcggcatggccttcgatcacgtaaatcttgtttttcggcgcattcttgatttgggtagcgatgatgtccaggcggagtttctctttcggactcagctcggtctggccgatgttgaagaaggtgatgcctttgctggtcagatagatgtcatcggtgtaggcattgccgtcgagctggtcggccggaataggattgggaccccacttcgccatttcggcagctttctttgcggcagcagcctcggcagcggcttttttcgcagctttgtttgctgcagccaggtcattggctaattcggcattgtcggcctgtactgcggccaaagccagatcacggtcagccacggcagcctggtaagccatcacatccgctgcggtgtagggcgaagcctgtttgaagccacggcggttgaaacggtacgtaagaccgatcgtggcactgtaagctgcggccactttctgtgttcccgaattcaggattgagggcatgttgctgctgggcagcatccaagccttgagttccagttcgatgtccagggccgggcatacgcggaacttgttgagcaaaccggctgtgaaagcgaacgaatggtccgtcccgtagccccagtcgcgctggaatttgtcggtgaaacccgatacgtggtaaccgaagccggcgaagggcactgcgtaatagacgcggtcgtcacgctcgccgccgatccagttcgacagattcaccatgaagtccatgtgcgtgaagatgtacgggtctttcatgtattggttgccgaatgccgtgtcgttctggtactggccgccctgaatttgcaggcgggcacccattacggggtggaaccatttggtcagcgagaagtcggcctgccagttgatgtggttgaagcgcgacgatccgaaatcgtcttttcccagcgtgccgttgaagaccataatttgggcgcctccggcgacggtgatttcccagttgtcgaagaaacggttggtttcgtaaccggcccagcctcgtctcttgggctgttgctcttctacgacgatttcttctgcgacagcgacaacctgggctgaagcggctgcggcacaaagaacgagtgccatcgtaatgaataattttttcatgtagttcgaatttaatgtgtaataattttttgttttcgtgtatgtaaacccttacacgggagcttgattcatctctatatatccttttgtagaagctaaaagcaaagtccgggccaaaagcccggacctcgtttgacgttttgtatattttattgtctgtcggcagagaatcaaccgcatttcgagtacccgcaggacatgcacgtaagacacccgttctgataggccatcgtctcctggccgcagctcgggcacttgtccttggttttggtgccgtccgagatatattgcttcagtgctcgttccacacccagcttccaggtattgatggtttcgctgttcaggtggagcgattcgatgagcgatacgacgttggtgatcggcatgccgtggcgcaggacgcccgaaatcagcttggcgtagttccagaactcttcgttgaacaggcgcgaaatgccgccgatggtgttggtgtagccgtatcggtcgatatactggaagtcgtaccgtttcgaaccgttctcctcgcgtacctttataataaagcccttgttgattttgggcggaatatacatggcatcctcttcgattttacccgtgaagatttcgtaagggcgtccgtcctgcaggccgacgaaggcgatccagttttcgttgccgtttttgaaacgcacgatgtccgctgggatcgatttggggcgtttgagaatggtctgtccgttctcctcttttgccgcttttttcttcttatcgatcagtacaccttcgcggcagccgtcgcggtaaaccgttacccctttgcagccgcactcccaggccgtgcgatatacgtccgctacgagtgcctcggaaacgtcgttcggcagattgaccgtcaccgaaatcgagtgatcgacccacttctgaatttcgccctgcatcttgactttggccacccagtcgatgtcgttggccgtcgcgccgtgatagggcgatgcggctacccaccggttgagctcatcgtccgatatgtcttgcagtttcgaggtgtcgtatccgttggcttcgagccatttgacgaagttgtggtgatagacgttgtactcttcgaacttttcgcccatatcgtccacgaaagccactttggcatcctggtccgaagggttgatcttgcggcgacgcttatagacgggacggaaaaccggttcgatgcccgacgtggtttgcgacatgagcgaggtggttcccgtaggggcgatggtcagcatggcgatattgcgtcgtccgtgttttaccatttcggcgtagagctccggatcggcctcccggatgcggccgatcatcgggttcttctcctccttgcgtgcatcgaaaatttcgaacgctccgcgctctgcggccatctttaccgaggcgcggtaggcttccagtgcgagggtcttctgtaccttcacggcgaaagccgtcgcttcgggcgtaccgtaacggagccccaatgctgcgagcatgtcgccttcggccgtgatgcccagtcccgtacgacgtcctttgcgggccatcgtgcggatctttttccagagttcgagttccacgcggcgaatgtcttcgtcttcgggatcggcggcgatcttgttgatgatgagttcgactttttcgagctccaggtcgatgatgtcgtccatcatacgcatcgccttctcgacgtgttgcttgaatttctcgaagttgaacgacgcttctttggtgaaaggtttgtccacgtaactcaacaggttgatcgccagcaggcggcacgagtcgtaggggcaaagcggaatttcgccgcaggggttggtcgccacggtcgtaaatccttcgtcggcatagcagtcgggaatactttcacggatgatcgtgtcccagaacattacgcccggttcggccgatttccaggcgttgtggatgatcttgtcccaaagtttcttggcgtcgatatcctgctggtagagcggtttgtccgagtgaatcgggaactgttggtagtatttcttcccggcgagtgccgcacgcatgaattcgtcgtcgattttgactgaaacattggcgccggtcaccttgctcgtatcgactttggcatcgatgaaacgctctgcatcgggatgtttgatcgaaagggtgagcatcagggcgccccggcgaccgtcctgagccacttcgcgcgttgagttcgagtaacgctccatgaaggggacgataccggtcgaggtgagcgccgagttgagcaccggactacctgtggggcggatgtgcgaaaggtcgtgccccacgccgccgcgccgcttcatcagttgcacctgctcctcgtccatgcggaagatgccgccgtaggagtctgccggattcttgtggccgatgacgaagcagttcgaaagcgaagccgcctggaagttgttgccgataccggtcatgggaccgccttgcgggatgatgtagcggaagtggtcgagcagttcgaacacctcctgccggttcataggattggggtacttcttttcgatccgttcgatctcggcggcgatgcgctcgtgcatatcgcgcggagttttttcgtaaatatggccgtacgaatctttcagggcatatttgcttacccaaaccgtagcggccaggtcgtctccgtcgaaatattttttcgacgcttcgaccgcttcgttgtaggacacttcggtcgggaggcccggttgtttgttgcttgacatgatatcttgagttttatttctttatgtctttacaggaatcgggaccgatgcaggcttgttccgttcggtcccaactatacaaatttcctgcttttcttcgggattttcgaatcttcccgcgacaaattattccaaagttatcaacaatggataaaacgtgcgtcccagtgatccgggacgcacgatttgggatatggcggagtcgtctgtcttcgtttttttgtccgccaagtcggttcgcccgtcgtgtgcctgtatagtgaaacgttgggcttactgcctatgtaacacgattatatagctttattgcgcctgtgctcgatactccctgccggaaatcctttcccgctctggagttcggttttcctccgaccggagagaagagggcggatcggattcgcgcatacgcacgccgatcgcagacggttgcgaacaagcccgaaaaacaacgcggaatctcgcgtcgttccggtatataatcgtttttttatgggcggcgaagtcaggtccttccgtccatgctttccgccggatgcgttttacttgacggcgacagcgtcgatctcgaccttcgcacccatcggcagcttggatacctgatagcagatgcgtgcgggcatatctttcgtaaagaatgtggcatagacggcgttcatcgccgcgaagtcggcgatatcggtgagcagaaccgtcgttttcacgatgtcggcatgcgagtaacccgcctcttcgagaatatgtcccaggttggtgagcgactggcgcgtctgatcttcgatgctttcgggcatcgcgccggtggcgccgtcgatcgggagctgccccgaaatgtagagcgtgtcgccgcactttacggcctgcgaataggggcccaccgctttgggggctttgggagatgcgataatggttttcatagtgtcgtattttcctgttacaatccaaataaaattggatcaaagttttcggttaaatttgtttttatcttatttacagcgtattgcatttcttggtgaacttctcggccaaaggtcaaggcacgagagcctccgccggcctttgatcgagccggtgcggaggcacatcgtgcttaacacctttggctctctcgaaagccgagatttcagaacccgaaaaaatccttcgataaacagattttccttagcggtcagctctctgccgcatatcccttattagtttacaaaggccagaggagcagattattttaagcggacgttaacgccgcaacaactatgtagtattctctctgggaaaatccgtttaccggaagggtttctctatgacacgatactattgacatattcggtctgatgtttcagcacaaagaatagacggtttaccagtttgcgggcgacctttacgatagctttgctcttgggcatccgtttgcattgttccgtatagaacaggttcatcgcagggtcttgacgtaccgccacccatgccgcttctatcaggttacagcgcataacggcgtgttttcgtatggtaatatcccccgtcccatctttctctccgctggagtggcacatcgggatcattccgatataggcagccagttgttcggcattgcggaagcgggttatgtcgcatatctcggagaggaacgccattcccgtagcctgcccgaaccccggaacgctcataatcaaccgcagcggttcgcggaatcgatccgtcttggccaatgtccgtaaagcccgtgtcatctccagtttctgacggcgtaactcttccagatgccggatatgaatgtcgagggcctgacggccgctcggggtgagcgtctctatctccttcaaccaggcgaaaaagcgcttcgaccagttggaaaacggagtgagaaactcctgcggaatctcgatgcctaaataccgaagttgagacttgagccgattcttctgacgggtcgtgtctttggttatcgagttcttcaatcttatcaaggaacgcatctccaacgatacgctgtccggcgtataaatgcctttcagctcgttggctcttaaactccgcgccagcttaccgctgtccacggtgtcggtcttacgcagcttttcgctgctcttggtcggcacgtcggccggattgaccacgatgttgtcgatccctaaggccgtcagacgctcgtgtatccaaaatccgcagaagcccgcttcgtacaccgagtgatactcggcgcccggataactccgagttaaaaatccgtacaacgcttctgggctcggatgctggctaaacttcttcaatacggaggtttcggacaagaccgtaaccgaccaactcttcaaatggacgtcgattcctacataaatcttttgtcctctgaaactaattttgtttctttgctctctcatggctatcgtcgttttagttagtaaaggttttgcagctttaatctaaccaaaatctcgatagctttttcatttatccgctatcatcgcggcttaccctgattgtaaacatagggattattttgattcgttaaaatttatggttgaattttctttttcgttgcattcggttcccgtttgatcgtaaaatagggtgcgtgctttttcggttgccgggtatgtcggcagccccgttttcgctccgtttcgcatgaatgttcgattttgagttctattttcctgcgaccgggccgtttttgtcttcgggaaccgtgacggagtacaaagttacgattattttggttatgtttgcacatattttgctggataaagattcaaaaccgatagcttatgacacgttttatgaaactggcggcattcgccgccctcgtgatgctcgtagcctcctgctgtccctgccgtaaacaccggaaaggcgacagcaaaccttttgtcggcaccgaatggcagctggtgcagctcaacggccgtgccgtaccggtcgaaggcgacctttttaccgtcgttttcggtgaggacggacgcctttcggggcttggagcctgcaaccggcttatgggttcgtatgaaaccacggaaacgggcggactgaccgtcggccagatggcttcgacccggatgttttgtcccggtttggaccaggagcaggctttcagcgacgttttgtccggagcgacccactacgaagtggacggcgatatgctgatgcttcttaccgacggcgaactgcgggctgttttgcaggccagatagccggattatgcggattttgcgacggaggaacctttcggggctcctccgtctgcatttatggaagttgcatttccttttttgttcgcaaccctgcagaccggatcggttcgtttcggatttttccgtgttgtgaattttctgttacaagcagataatgcgcgttatatttttctatatttgtaacaatataggatgcgttcgggcgtcgttgaggtagattcggcccggcgttcgcttttcactcgttgccacatggccggactttatttccatatccctttttgccgcaggatttgcgcctattgcgactttttcaaaagcgccgaggtggggcgtgtcgattccgtgctggatgcgatggggcgcgaattggacggagccgtcgattggctcgccgaccgtcggatccgcaccgtctatttcggcggcgggaccccgtcgctctgcgatcccgcccggttgcagggactggcggaccgggcggcgacgctgctggattgcagcggtgtggaggagtttaccgtcgaggccaatcccgacgatatgaccgaagagtggctggaggcgctggcccgtacgggtgcgaaccggttgagcgtgggcgtgcagtctttcgacgacgacgagctgcggctgatgaaccggcgccataccggtgcgcaggctgtcgaggctgtgcggagggcacaggctgcgggttttgcgaatctgacgatcgacctgatcttcggcgttccgggtttcggcgggaaagtgttgcaacgtaacctcgaacaggctctggcgctcggcgtgcagcatatttcggcataccatttgacagtagagaaaaatacggccttcgggcgtcgcctggagcgcgggcggttctccgaggtggacgaacaggtgagcgaacgcgaatacctggaggtgcaccgaacgctgaccggggctggattcgagcattacgaagtgtcgaattatgcgctgcccggctgccgggcccgtcacaatgccgcctactggtcgggcgacgagtatttgggcatcggacctgcagcccactccttcaacggaaagtcgcgccgctgggccgctgcgtcgatcgacggctacttggccggtgccggaacggaggcgatttacgaacaggagcggcttacggagcgggatcgctacaacgagcatctgatgacccgcctgcgcacggccgagggactcgagttggcgacggtcgaaacctgtttcggaaaagagcgggcggagcggctgctgcggcaggcggagcctttcatgcgggtcggagagttgtgtctcgcggccggtcggctggcgattccggcggagaagtttctggtgtcggatgccgtgatcggcgcgttgttcgaggcggacgactgattgttgaataatcaaacctttgaaatatgaacgatatgaaactgaaacccgactgtctcttcgagatcagttgggaggtatgcaataaagtgggcggtatcaacaccgtgatagcgaccaaggcccggaccgtatgcggaaagtacggcgatcgctattttacgatcggtcccgatctgggacagggggctgaccgggagttcgaggaggacccggcgctgctcaaggggtggcggcagaccctgtatgaaaaggggatccgtgtccgagtgggccgttggcgcatcgtcgggcgggcgcaggtgatcctggtcgatttctcctcgctgattccccgcaaggacgacatcttgaagttcctttgggagagctaccgcgtggattcgatttcgggccagtgggattacatcgagccggtgctgttcggctatgccgccggactggtcgtagcctcctacgtcgaaactttctgtaagtccgccgaccgggtcgcggctcatttccacgagtggatgaccgccgccggaggactttatctgcgccgggagtcgccttacgtagccacgttgttcaccacgcacgctaccgtgctgggacgcagcatcgccggaaacggaatggcgctttacaaggatttgactacgttcaatgcggacgacctggcccgtcgtttcggcgtgacggccaagcattcgatcgaaaagaaggcggcggccaacagcgacgttttcctgaccgtcagtggaattacggccgtcgaatgtcggtatttgctcggtcacgaagcggatgccgttacgcctaacggcttcgaggacgatttcgtctggcagggcgatgactatcgggtcaagcgcgaggaagcccgcacggccttgatcgtcgtggcggaagcctgtctgggacgcaagttgcaggacgatccgctgatcgtcggcacgagcggccggtacgaattccgcaacaaggggctggacgtgcttctggagggtatgaagcggctggccggtttggagcgtctggagcgtgaagtcgtgttgtacgtcatggtgccggccgccaaccggggggcccgcgccgacttgcagagacacctgcaggatccctcgcagccgatcgacggctcgcaatggccctggtcgacccattatctggagaatatgcagtgggacccgatcgtgcgggcgatcgacggcagccctttggccgatcccgcgtccaaagtgcatgtgattttcgtaccttcgtatttggatgaccgggacggtattttcgacaagagctattacgagttgctcgtgggcatggatttgacgctgtttccctcctattacgagccgtggggctatactccgctcgagtcgatcgccttttccgtgccgaccgtcaccacgacgctggccgggttcggtctttggatcgaccggcgggaggagcatcccggcgtagcggtgctctgccgcgaggacggcaacgacgacgaggtggcctctgcgctggccgacgccgtgctgcggttttcgcagttggaagccgctcgtgtggaggagatgcgtcgtgctgcgggcgagttgtcgaaagaggcgctttggagccggctgttcaaggcgtatgaggaggcctatgcccaggcgatcgataatgccgatgtgcggatgaaccatgcggctgcggatacggcgcagttgccagagcagcaggttaaattggtgtatcaggtgctccgtcccgaacgtcccgactggagccggacgatggtggagaagaatctgcccgatcggctccgccctctcgaggaattggctcacaacctttggtggtgctggaatcccggagccagagatctgttcgaagagatagatcctgacctttggaaccggagcgagcgtaatccgatcgcttttctcgacttgctcagtgtgaatcgtctgaaggagttggagcgggacgaacggtttctggtgctgctcgatgcggtatatgcgcagttcaggagctacatgtccgagaaacccgatccggcgacgccgaaaatcgcctatttctcgatggagtacggcctgcacgcttcgctgaaaatctactcgggcgggttggggattctggccggcgactacctcaaggaggcgtcggacaagaacgtgccgatggtcgcggtcggactgctttaccggtacggttattttacccagaagctttccgctcaaggagcgcaggaggcgacttacgaggcccagaatttttcgaagctgccgatcgagcctgtacgcgatgcggtgggtaactgggcgactgtgacgattccgttgccggggcgtacgctgacggcccgcatctggctctgccgggtgggacgtaccgatttgtatctgctcgacgccgactacgaggccaacctcgaggaggatcgtcgggtgactcactacctgtacggcggagactgggaaaaccgtctcaaacaggaaattctgctgggtatcggcggggtgcgggcgcttcagtcgctgcatattgcgcaggatatttcccattgcaacgaaggacatgcggcgttcctcggcctggaacgtatccgcaatttggtgctgcgccgccgcctgactttctccgaagcgctggagattgtccgctcttcgtcgctgtttacgacccatacacccgttcctgcgggacacgatgcctttcccgaggcgatgatccggcagtatctgtctcattatcccgaggaactggggattggctgggcgcagttcatcggcctgggacgtgtcaatccggaggacccgaacgagaaattctcgatgtcggtgctcgcctgcaacctttcgcaggaggttaacggcgtgtcgtggctgcacggcgaagtttccaaagagattttggggaatttgtggccgggttacttcaaaaacgagctgcacatcggttacgtgaccaacggcgtgcattttccgacttggacggcaactcgtctgcgccgcctttatgcccgttattttcccgagggattcggcggtcacgagtatcgtatttcggagtggaagaaggtttacgacattccggacgaggatttgtggcgggaacgtctggtactcaaggagaaactcgtccgtatgatccgcagccgctattgcgatcccgggcaggtgcgcatggattcgccccatcaggtcatgcaggtgctcgaagggatcaagcccgatgtgctgaagatcggtttcgcacgtcgtttcgccacctacaagcgggcgttgctgctctttacagatttggatcgtctggcagccatcgtcaataacaaggagcgtcccgtgcagtttattttcgcgggcaaggcgcatcccaacgatcagccggggcaggatctgatcaagcggatcatcgaggtcgcggccatgccgcagttcgcgggcaagatcatcttcctgcagaattacgacatggagctggcgcgtcgtctggtacagggcgtggacgtgtggctcaataccccgacccgtccgctcgaggcgtcgggtacgtcgggcgaaaagtgcgtgatgaacggcgtgctgcagttctcggtgctcgacggttggtgggtcgaaggatacaaggagggcgccgggtgggcattgccgatggagacggtcttttccgatccgcagtaccagaacgaactcgacgccgagatgatatacaatacgatcgagacggagatcgtgccgaaatactacgatcgggatgccgacggcatcccccgtgcgtggatggcttcggtgaagaagtgtatcgccgagatcgcttcgaactttacgaccaaccggatgctgcgcgactacgaggtgcgtttctacaaccggctggcggcccgcaagcgggaactgtcggagaacgacttcgccgttgcgcgcgagatcgtcgcctggaagcacaaggtgctggctgcgtggcctgccgtgaagatcgtggacgtgcagcgtgcccgggtcggcgacaagccgatcttcataggacgcagttaccatttcgagcttacgctcgacctggccggactcgctccggaggacgtgggggccgaactggtcgtggcccgtcccgtggagccggaccgggtcgtggaggtcatccgcaccgtgccgctcagccaggtgcaggtttcgggcagccaggtgactttcgccttggactatgttcccgagcaggccgggatgttcgatatggcgctgcgcattttcccgcagaatccgatgttgccgcatcgtatggatttcgcactggtgaagtgggcatgaaatgattgttgaaaaaaaggtcgttttctgataatttttgatttttcgcacggtttggacttgatggtctgcgaaaaaaagagtatctttcagaaaagatcgttcaagcggaccggaactttttctgatccggtcggcggagaaaacgaaataaacgattcgacgggtccggcaggagtacgggctgattttgccgttccgctctgtcggaaatgaacataaagaacaaacagttatgtcggtacttacatttgataagaaggaactgggaaatctggagtattcgttgcagcgcgaaatgctggctacggatcgcagaggcggctatatgagcacgaccatcgtttgctgcaacacgcgcaagtatcatggcctgatggtggcacccatcgacgacagcgaccgcgcttacgtgctgctctcgtcggtggatgaaaccgtcgtgcacgacgggcaatccttcaacctggcgctacaccgtttcccgggaacctatgaacctcgggggcataagtacatcaccgatttcgaatatacgccgacaccgacgatcacctaccgcgtgggaagcatcgtgttgcggaaagagctgctctggatacacaaccgcacgcagttgatgatccgctatacgctgctggaggcgccgtccgatgtccggcttaggctccggcctttcttcgccttccgggacaaacatgcgctcacgcatgccaatatggaggccgacggacgttcccggccgattccgggcggggtgaagtgtcggttgtattccgattttccctggctgtacctgcaaaccgattgtcgggatgcggagttcgtgccggctcccgactggtactataatttcgaatacgccagagagatcgagcgaggatacgagggagatgaggatctgcttacgacgggttatttcgaactcagtctcggtcggcggcaaagcgtgattttctctgcgtccgtcgaagccattcccgatcctgcggccatcggcggaatgtttgcggaggctctgagcgcccgcagccgcaaggtcgattttctgagctgcctgcgccactctgcccggcagttcgtcgtccgccgccgggacgggcgggccgaggtgctggccgggtatccctggtatgggcagatcggacgtcagacgctcgtagcgctgcccggcatcgcgctggagcagggacgcacggaggattgcctggatgtgctcgatacggtcgtgcgcggacgccgggacggtatgtttacgggttctttctcggctgccgaggctgcggatgctccgctttggtttttctgggtgcttcagcagttgcagcggacgctgggtgaggaggagatatggaagcgctacggtatcgtgatgaaagagctgctggcggcttatcgccggggcgtcggcggcgtggccgtgcacgataacggtttggtgtgggcctcggcgcccgacaaagccctcacctggatgaatgcgctggcgggtggtgtccccgtcgtgtcgcgggacgggtatccggtcgaaatcaacgcactttggtacaacgccgtgtgttatgcccttgagctggcttcccgtttcggcgaggaggagttcgtcggcgagtggaaagcgtggcccgagcggattcggaacgcttttcgggagatgttctggagcggcgacgacgggtatctggccgatttcgtaggtcctgaagggccgaatcggtggattcgtccgaatatggtggtggcgtgcggtttggattacaagatgctcgatgaggagcagcaggcttcggtgcttcggatcgtggggcagcatttgctgacacccaaagggctgcgttcgctttcgccccgcaatcctcgctataagaaccgctgcgagggcgatgaagccgttcgtgcggaggcttcgatgaacggctccgtatgggtttggccgctttggttttatgtcaaggcttcgttcgacctcggtggccgtgagtttctgcctcgggcggaggagctgctcgcccgtttcggcgaggagattcagagttacggtatcggatcgatcaacgagctgttcgacggcgatcctccgcatgcgccttggggcgccgtgtcgcaggcgtggagtgtcggggcggtgttgatgatccgtgaaacgaccgaacgctggcgtcgtcgccggggacacgggttgttgccgggtcttcggaaaaagcgctaaaggatgcgaaggaaaagaacttgccgccgcgtaaggtgtccgaaattttttctgtcggcccgggcaggccgggatggaggttgccgggaggggcgaccggtgtttcgcgaagtcgaataagttacgaaatgaaacgtgattatatactttgagtgtaccttttcgggggcgcagtgtcccaaattccctccgagaagcggatttaggggaagggtgcatggcggacacggtttcgggccgcgaataagcactccttggattcgatgctgcgaccgtcggataagggtacatggaaagatataattgttagaataaaaaaatagaatacaaatgagagtgttgatgttcggctgggagtttcctccccatatcgccggcgggctgggtacggcctgctacggtatgacgcgcggtcttgcacgcaacggcgtggaggtcgttttcgtcatgccgcgtgcctatggcgacgaggaccagcgcttcgtccgcgtggtgaatgcgagcgacgtggaaacgatcggtacgcgcgatcatgagttttccgaagagctgctcgagaaggtttcgttcatccacattgattcgaacatgttgccctacatctctccggaggagtatgccgcctaccacgatgagttcgttcgcagcggccggacacacgagtggaccgatgtatggaaacagcgctacaccttctccggaaaatacggcgccaacctgatggaggaggtcgcccggtatgcgatggtggcggcgcaggtggccaaagacctcgaagggcagttcgacgtgatccatgcccacgactggctgacttatttcgccggaatcgcggccaagcgggtttcgggcaagccgctggtggtgcacatgcacgccacggagttcgaccgcagcggcgagaatatcaaccgtcgggtctatgccatcgaaaaggcgggtatgcaggctgccgatcgggtgatcgcggtgtcggagctgacgcgccgcatcgtcatcggcaagtacggcattccggccgagaaggtcgtgacagtgcataacgccgtgcgtttcggcgagtcggaggatgctgtgccggagcgggccgtcaaggataaggtcgtcacctttctgggacgcatcacctaccagaaaggtcccgattatttcgtcgaggctgcggccaaggtgctgcagcgggttccggacgtgcgtttcgtcatggccggctcgggcgatctgatgaaccatgtggtgcggcgcgtggcccagttggggatcgccgaccgcttccatttcacggggttcctcaagggcggggaggtgcagcggatgttccgtctgtcggatgtctatgtcatgccttcggtgtcggagccgttcggtatttcgccgctcgaggccatgcgttcgggcgttcccgtgattatctcgcggcaaagcggtgtggcggaggtgctggattacgccattaaagtgaattactgggacgtggatgctctggccgatgccatttacgggcttcttacttatccggctctgggcaggatgttcgcttcgaaagggctggaagaggtgaccggactcaaatggaccaatgccgcagcgaagatcaagacggtttacgaaactgtcgtcgcggaggcgaacaattaaaatatttgcggagtatgaaaacgatttgtttctattttcaggtacaccagccctggcggctgaagcgttaccgtttcttcgatatgggccgtgaccacaactacctggacgacctgaccaatcgctcgatcatgcagaaggtcgcgcgtgagtgctatctgccgatgaatgccttgctgttcaatctgatccggcagagcgaggggcgtttccgctgtaccttttcgctgacggggctggccgtcgaacagatgcgggcgtatgcgcccgaggtgctcgattcgttccgccgcctggcccggacgggctgcgtggagttcctggccgaaacttactcccattcgctggcttcgctttcgtcgaaggaggatttcatgcagcaggttgcgctccataccgaactgatgaaaaaggagttcggcgttgcgccgaccgcctttcgcaataccgaactgatctattccgaccggatcggctccgatgtggccgagatgggtttcaagaccatgttggccgagggagcccgacacgtactgggatggaagtcgcccggctatgtttatgccaatgcgctcgaccagcgcttgaggctgttgctgcgcaattacaagctctcggacgacatcgcgttccgtttctccaaccgagggtgggaccaatggcctctcacggcggaaaaatacacggggtggctcgcttcggacgagctggagggggatgtggtcaatctcttcatggattacgaaaccttcggcgagcaccagcgtgccgatacgggtattttcgactttatgaaggcgctcgttccggctgttctgaagcgggaggggttggagttcgctacggtgagcgaagccgctgcgaaataccagcccgtcgccgtactccattgtccgcacgtgatgtcttgggcggacgaggaacgtgacatcacggcgtggctgggcaacgaattgcagaacgaagctttcggaaaactgtatgccctgcgggataagatcgcccggctgaaggatcccgatttcgaccacgtgtggaacttcatgcaggcttcggatcatttctattatatggcgaccaagtggttgtcggacggggacgtacatgcctatttcaatccttacgaatcgtcctacgatgcctttatcaactatatgaacgtgctttcggatttcgagatcgaagtggagaaggcgttcgaccggaagccgccggtccgcaagaccaaaccgtcgccgaggaaaaagggttccgatcgggagaaagccggggtgcgataacctttcggtcgaaaaaggcggtgcgtcataacaggcaaactgcttcgttattatcggtgtcatggctcgatcatgtgcgtcggtacacactcttcgccgtgaacctcgatgccttgtattttacctgtttttacatacctgaaaagggatgcgccgaatttctcgatttgacacgtcccttttttattccgggatgcctcggtccgtcagctgcccttgcgcttgaaccgcgacgggctgtagcccgtgtgctgtttgaaatatttgccgaagaacgactgggtcgagaagttgaggtgataggcgatctcctggatgctcatgcccgaatagcgcagcaggctttttgcctcgaggatcaccgcttcgtcgatccaccgggcggcggttttgccgctcacgtccttggaaacggtcgaaaggtatttgggggtgatgttgaggcggcgggcatagaaccggacgttcctctcctgtttgctgtattgccggactaattccatgaactcttcgaagatcacctcgccgcgccccagcttgaccgtgtttttctgctcgcgcatgttcagctcggtgatgatgtagaagactgcggtgaacaggcagcggatgatctcctgtctgtaatgttccttgtcgctggcaagaatcgtcttgatgagttggaacacctgtcggatctcgtgcgtgtcctggggtgtcacccgcaggcagggctgtttgccgaaacgcatatagacgggcagcgaggccgaaaggtctatctggatctcgttgatgaacgatttggaacaggcgacgaaataggccgccgcatcgctggtgctggctaccgtgcggatcacgcggtcggggctgaagaagacgatcgtgtcgggcacgacttcgtactcttccgtatcgatcgctacgacggccgaaccgctggccatgatgatcgccgagaagccgtcaatcagggcggggtagttacccagcgtatcgcggtggatgtcgaacgaagcgatcaccaggtcgtccgacaggtaataaacgtcccgcatctcctgcttgatgcgggagatcgaaactttttgcagggttatctcgtccgccaccatgccagtttgctgatcagattcttgaaataggcgaaccggccccggcggggtgcctccgacagcgggcagacgacgcggagctcgttgtgcagacattcgatgtgcagcgggaaatcggcccccttctgtccgtccacgtcggtaggttcgttgatcggcgaggtgatgtcgagcgtgcgggctcggaaatgttttacctgcgagggccgaccgcccagcaggtgacggagcatcgatacgaccgagaagagcatgttgcgcctttgcagcaacagacagtcgaacataccgtccttaatgctcgagcggggggcaaggtggaatcctccggccgtttctccgttgaatatcaaggccatgagcgattcgaggtcgaaggctttgccgtcggcgagaatttgcagcggaatgccgtgtaccgagcggaactccttcacgccctcgatcaggtaggccagcttgccgatctggtgcttgcgtttgtccggcgtgcgctgggacgtggtggtgaagatgccgaaactgaagatattaacgaaatagtggtcgttcacgcgtccgcaatcgacccgctcttccgtgccgccgaggagctgcgccgccgccttgaccgggtttttctccatgccgagcgctccggcgaagtcgttggccgtacctgccgggatgatgcccagcagcaggtcgaggtgcttctccttcatccgattgaccacgtaattgaccgtgccgtcgccgcccgccacgaccaccagatcgaccgtttcgtgtccattgaaagggttgcggctgaaatcgatcgggccgtctacgatcgagtagccggcctgccggaacatttcgccgatggcttgggaatctttttcgatttttccttttcccgactgggggttatagagaaatagaacttgtttcattcgtacgcaatgggattattctggaatcatcatttcttgcatcgccggcgagcagtaaatttcgtagccgtctttcccgtcgtcgaggataaaatagaccttcgcgtcgggaattttccgggagagggcgatggccttgttcgcgcccaggctcaaatacatggtcgccatggcgtcggcttcggcgcagttgtccgcgaccacggtggcggaaagcaatcgtgacgtgacgctgcggcccgttgtcgggtcgatcgtgtgggatatcttattgcctgcggcgtcgcggtagaagcggcggtagttgcccgaagtggccaggcctccttcgctcatgcggatacgtccggtgagataggcgccgtcggacatattgccgtcgaagggagtttctatgccgatccgccagggaatgcctttgctgctgacaccctggcagcggcattcgccgccgatctccaccagatagttcttcgcgccgcagcgctccatgagggccgcgaccagatcgaccgtatagcccttggcgatcgagttgaaatcgagctgtacgcggggatcgtccttcacgagcctgccgtcccggatatggacgcgccggtaacctacgaattgcaggagcgaatcgaggttcggggtgcgttccgcctcgtgcccggcgaatccccaggcatcgaccagcggcttgaccgtcacgtcgtagtgaccttcgctcaagcggctgaaccgttcggccagacggaggttgtagatgatatgttcgtcgagcgagtcggtctctccccggttgatgcggctcagcagggaggtggagtcgaaaatcgacatcgaagccttggcttcggcgtcgatttgcataatggcccggtagagttcctgtgcggtgcagtccgtgatgtcgcccgttgcctggaaagtcgtacccagcatcgcgccgcttgccgtaaggtactctgcgcggcggtcgcagctcgctgcaaggaccagaacgataacggtgtagagcagcagggcgatctttttcatgttctatgtgtcttcttttttggcaaaaatagtgtttttcgctccggtttgcaaaaaaagagggctcttcagctaaaaaattgtattcgtttaagttggttattgtgaattaagttcgtacctttgcgccacgctctggcgttattcacggtaaggggaatgcgtcgtagagtggaactaaataaacttttgaaaatgggttatttatcagctgaaaaaaagcaggagcttttcggtaagtacggaaagtccaacaccgacacgggttctcccgagagccagatcgcgctgttctcgttccgtatcaaccaccttacggaacaccttcgtagcaacaaacacgacttcggtacacagcgtgcgttgctgcgtctggtcggcaagcgccgccagttgctggagtatttgaaagaggtcgatatcgagcgctaccgagcaatcatcaagacgctcaatctccgtaaatagtcccggaggcagaaaaatggggttggccaaagtttcttttggcagccccatttgtaatttggaacatacattttgacgtaaaaatatctatggaagaaaagaagttgtacaatgcagtccggaagacgatcacgctggcagacggccgcgaaatcatgatcgaaacgggcaaactggccaagcaggccgacggctccgtcgtggtgaagatgggagatacgatgctcctgggaacggtggtagccgccaaggacgcgaaacccgacactgattttatgccgctccaggtggagtataaggagaaatatgccgcttgcggtcgctatcccggcggcttcatgaagcgtgagggcaaggctaacgacagcgagatcctcgtagcccgtctgatcgaccgtgcgctgcgtcccctgtttccgtcggactatcacgccgaggtatatgtgaccgtaaacctgatttcggcggacaaagatattcagcccgatgctctggccggactggccgcatcggctgcactggctgtttcggacatcccgttcggcggtccgatttcggaggtgcgtgtggcccgtatcggcggtcagtacgtcatcaacccggccttctcgcagatgcaggacgccgatctggacatcatggtcggcggtaccatcgacaatattctgatggtcgagggcgagatgaaggaggtgtccgaggaggtgatgctcggagctatcaagttcgcgcacgaagagattaagaaacactgtgccgtacagatcgaactttcgaaggagctgggcaaggacgtgaaacggacctattgccacgaggtgaatgatgaagagctgcgtcagaccatcattcgggagctttacgacaaggcttacgccatcgccaccagcggtacgatgaagcatgagcgcgaagatgccttcaatgcgctggaggccgagttcgccacccgtttttcggaagaggagctggtcgagaaggcaccgctgattcacaaatatttccacgacgacgtacagaagaaggccatgcgcaacatgatcctcgacgagggcaagcgcttggacggccgccgcacggacgaaatccgccccatctggtgcgaggtgggctacctgcccgccgctcacggttcggcgatcttcacgcgcggtgaaacgcagtcgctgactacggtgaccctcggtacgaagatggatgagaaggtcaaggacgaagtgctggtacagggtaccgagcaattcgtgctgcactataatttcccgcctttctcgacgggcgaggccaaagccgcccgcggcctgagccgccgcgagatcggtcatggccatctggcatggcgcgcactgaagccgatggttcccgtcggagaggaaaatccttatgccgtgcgtgtggtgtcggatattctcgagtcgaacggctcgtcgtcgatggcgacggtttgtgccggtacgctggcgctgatggatgccggcgtgaaactcaagaaacccgtttcgggtatcgccatgggtctgatttcggattccgctaccggtcgttgggcggtgctttccgacatcctgggcgatgaggaccacctgggcgacatggacttcaaggtgacgggtaccaaggacggtatcacggctacccagatggatatcaaggtcgatggcctttcgtacgaggtgctggccaaggcgctggaacaggctcgcgtgggccgtatgcacattctgggtaagctgacggagtgtatcgctgagccgcgtgcggattaccgtccgttcgtgccgcgtatcgtacagatcaccatcccgcaggatatgatcggtgccgtgatcggtcccggcggcaaggtgatccaggatattcagaagacgacgggtacgaccattaccatcaccgaaaccgacaacaagggcgtcgtggatatcttcggtctggacaaggaggcgatggatgcagccctgtcccgcatcaagagcatcgtggcgcagcccgaggtcggcgatgtatataacggcaaggttcgttcgatcatgccgttcggtgcgttcgtcgagatcatgccgggcaaggacgccctgctgcacatctcggagatcgactacaagcgtttcgaaacgatggaggagaccggcctgaaagagggggatatgatcgaggtgaaagtcatcggcatcgatcccaagaccaacaagctcaagctgtcgcaccgcgtgctgattccgcagcccgaaggctggacggagccggagcgccgtccccgcgagcgcggcgatcgcccgcgccgccgtcctgagcacaaggagtagaactctgcgggtccggatcgctgctacggagataatttcggttttgttcggaaattttggccggaatattgtacaatatttgtagataatttttatatttgcattactccgtagcttttgtggggcagataaaacaggcataaatagaaaaagaaaggatttaacatttaatttttaaaagattagtttatgaaaaagctgatgaaattgagcttgctgctcgtggtcgttgctttgacgttttcgagctgtaattgcttcaagaagatggcaaagaacagcgatgatgtatcgctgacgtgtgcacctgaagtgctggtactgaataacggtgtggttgccgccgacattacggcacagttccccgtgaagtacttcaaccccaaagctatcgtgaaggttactccggtgatggtattcgagggcggagaagttgccggtactccgaaattcttccagggttcgaaagtgaaagagaactatacggtcgttgataagaagacgggcggtgtgttcaccatgcatgtcgagttcccttacgatgagcgtatgcagatttccgaactccagttgcgtgtcgaggctaaatgtccgggtagcgacgagtttacgctggttaatgccaatacgggcaaggtcgtgaaggccaaggagctcgaggctaaccccgcaatcgtacgcgagtgcggtctggtcgttgccgagggtgtgaataccctgcagcaggatctggcttacgccgatgcgatggcagctctgccgagcgactacaaacgcgtgactaccagcgtggacaagaccgagatcctctatgcgatcaacaaggctaacgtaaccaagaaagcgctgaaagacgccgatctggaggcattccaggcgaatgtggatgagaacctgaaaaacgaccgtgctacccagcatgttgccgtgaagggttatgcttctcccgacggtcccgtgaagttcaacgacacgctgtcgaaggagcgtagcgaatcgggcgacaaagttcttgcgaaactgctgaaaaattcgggtctggatatcgacgttgccgcttacggtgaggactgggaaggtttcaaggagctggtttcgaagtcgaacatcaaagacaaggatctgattctccaggttttgagcatgtactcctcttcgacgcagcgcgaggatgagatcaagaacatgtcttccgtattcaacgagctgaagaaagacattctgccgcagctccgtcgttcggtgatcgtgaacaccatcgatctggagggcaagaccgacgccgagatgatggcgcttgtcgaggctggcaagctggatcagctcaacctgaacgagctgctcttcgttgcggagtcgatcgcacaggacaacgctaccaagaacatcgtattggcttatgctgccgagaagtataacgacgcccgcgcttacaacaacctgggtatcgttcttacggaggaaggccgcacggctgatgctttgaaatgcttccagaaggccgctcagttgggcgaggcttccgaggcgctgaacaccaacctggctcttgccaacctggcgaacggcaatatggcagaggctcagaaatatgccaagggcgctgatgcaaaggcgaagagcctggtcaatgcagcacagggcaactacaacgacgctgccaagcagctcgacggtatgaatgccgctatcgctaacacgatgaacaaggactatgcggctgcaaagcgtgctatcgctaaggatatgagcgcagaggccgattacctgcgtgccgtgatcgcttcggaagagggcgatatgagaacggcagaggcacagttgaagagcgccgtgaagaaggatgagaagatggcgaagaaagccatgaaggatatccacttcaagaaactcttcgaagagggtctgaagttctaatccgttcggattcgatgaaaaatatccgcaccggaaacggtgcggatattttttgtctttccatgtaccccttgtccgacggttgaagcatcgaacccggggacgcttgttcgcagtccgtggctgcgtctgtaatgctgaccatccctgaatccttttaccgggaaggggatttggaaaactacgctcccaaaaagtatataattgcatttttttggagtttatactttcgtgtatcaagatcgtttttttgtcggtttcggcggcggcttacagctttgcgggccgttattcaatgcttgcccctaccttgcgcctttccctttgggtggttttgaggaaggtcggtcggcatcggatcggtaattgtgatacataatcggattttgcgatgatagatcgctcgatcttgcatgagcgatggtcgtcttttccggtttgggaaagttcgattgcctcctctcgaacaggattctcggaaggggcggttcgtaaacacggcttgcgacttaaagcgatggtcgtcggatttcggagtccgaaacggggagttcctgaagatgggatggccattttcagacgcggatcgtccgggtaggatcggatgcgcacgaaatttgcggtatattggaagaaatatgaaaaagatctaaattttttatatttttgtcgaaagcgaatcggtgtcggctctatttgtttgtctttgcagcacttttgatcgtttggaaaacgggcctttctgggttgaaatgatattttacaacgggtaacggtcgtgtttttaccgatggaaggttgcgttttgcacgaggcttgttatggattttatgtatgtggggacggttcgatattgactttttgttttgcgctttgaaggcgaaccgtctgtgtaaataataggaaagttatggaatacgcgaatcatttgaaagaatatgcgccggcaatgagcgaggctcaggtggccgaggaagtggatcgtatccgtaaagctgcggtacgaaaccatactccggaagtttacaagctctgttattcggcggtggatttaaccacgctgtcgtgtacggactccgtggagtcggttacggaatttgccggcaaagccgtcaagttttaccaacagtttccccatcttcccaacgtggcgtcgatctgcatctatccgccgttcgtcgaaacggtcggtgtggtggtcgatggtacggatatgcgtatcacgagcgttgcgggcggatttccttcttcgcagacgtttctcgaggtgaaggttctcgaagtagccatggctgtcgagaacggagccgacgagatcgatatcgtcttgaacgtgggtaagatgttggaggggcattacgacgaggtcgctaacgaggtcgaggtgattcgtaccgagacgagtcccgaggtcgtgttaaaggtcattatcgagtccggagctttgaaaactcccgatctgatccgcaaggcatcgttgctttcgatgttcgccggggccgatttcgtcaagacttcgaccggcaagatcgatgtgtccgccacgcccgaagcggcggtggtgatgtgccaggcgatccgggattactatcggaaaacgggacgtaaggtgggcttcaagccggccggcggtgtccggagtgccgaagatgccgctttgtattatacgatcgtcgaggagattttgggcaaggagtggcttacgcccgaattgtttcgtatcggagcttcgtcggcggccaacaatctgcttacggctatcgaaggtcgggaagtcaagtttttctgatccgaatgggcgatggattaaaaaagagcggcacgttaaggcaaactttttttgtttgataattgattgataaccagtagttagtttcgcttaaaaaagctaatctctacttataagcatacatagagggtttcaataaccaactgatactgaagacaaaagtatataaaaaagtcggattgtaaaacactggaaaagaaccttcttttatcaatcaaggaaatcaaaaagtgtatagagcaaagtggcgcatgtatggtatagataattccgtacatgcgccactttcttaatcatctgatttgcattgatttacattaattgttattatatactatcatttggtactgataagcattgattttgcttgtggggtgtattattgtccacctaaaaaaatcaagaatatctccttgaaacgggtttgacgagcaggtcgatgtgctcgtgttcaaggatatgttccatagccttgtatatgggcatcttttcgataccggcaatcttcagggcttccatcttgatggtattctcgatgagcaacaggtagtcttcctccttcagctcaacatatttctgtgactgtgattttaattttgccatattgatgttgttatttgtttccgaagtcggcaggaatctcaccccacaggcggttgtcccagtgcagcacttcgatgtccttgattcttgcctccatcactttgaggaatatctccgctttctgcaatgccgggcatctgcgtgaagaggctgtctgtttgttacgataccacgtgatggctgtaatgctgtccgagtagattgttcgcggactttccggatgttccatgacatatctgaccgcctcgacaatgccgagaaactccccgatattgttcgtccagttaccgatagctttggaaaagagttcttttcctgaagagaggtcgacagcccggaagcgtgtcaacctctcttttgcagaatgggcaccgtcggtcgcaatacccacgaccggtttttctttcattgaattcctccctgatgtctgtctcccgtatagatgaacccgtcggattccatacgtcgtaccagagcacgcgcctgattcagatagtcggtgatgacaccttccttgtacttgatatccttgcgtcccttgaggatttccagcacaccgtctattgtgcggctcattacgctcttgccgtctttcgggtcgaagaaaatctttttgttgccgaacgtcacagttacttgatacaatgtcttcgggacgatcactgtttccacatgcgcctgaaataacacgggggtagcggcaacgactacatacccgttggctttgtgcatgggtttcaactctaccgagtatagtatgtttggctcgagagttcctttcaggtcttccgaaaggacacaaatctgcttgccgaatcttgagtcttcacggactcccatcaatttacgtgtcttggaatggcgcgaaacgaaccctatcagttcgcccgtctcttccgatctcgcaaacttcagttgcgatttttccgatgtcatattactgttctttcatattcaatctattgctttcaattgacaatctgttttcaatgggtcacttttccatacaaatatatgccaatttttcacgccaacaaaacgttttagttattaattttcagatggttatgtgtaatatatatagagaaaaggctgcattcagtacagcctttcctcctctgtaaaatgactgaaacgctcgtcagtatcagaagtttgcagtagataacggcatttccaataacggtaaatccgccttccgttgggtatacagtgatttatatcgtcagcattcagatattggttcccttgttccgtaccgtggtgcatccatgtagcgcacccgggcaggtccgggttgttccggacatagaagtccattttctctttaccggcgacaaagatattgtgtatccgtacgtccttatcgataggaaaccggtaggcgtacaacgcgaagtcacagatgtcggtttccagcaggttgccgccaaagtgttcgggagctttccgtttcaggttctcgaacccctccaaaatacccggcctgtcgcatatctcggcaaacctttcatccgttaccggcgcagccgtcgcataaaccacccgaaaaccattatccgtactgtccagtaccatgacatgcgcgactatccccggtgatttgttgatactttcgtcaatgctgtccgagtccgtggtcagacagcatttcagcgttccgatgattaataccgctaccaccaacagtgtccaaggacctattgctgccgctatcaatatcaattcatcggcccgtttccgtatttgtttcattgattttgagaatgtggcggccggataccccccggacctcggacacgcataccttgcatcctgcatccagcaaccggtttctacattcttccaaggcggcgtcggaaatcctgatggcaggtatacctgccgccgtcatcttgaaccggggcacttccgtgatccgggtaatcgtttcggcatcatcaaaatacgcctcgaatgaatctccgacatggaaaaggatgatggtttccacgccatgcctttccttcatgccgccgtaacagcggcgaataatctcttcctttttcatatcaaatagatatattaggtttgatgtcagccaaacatgaaagtgcctgtaatccgttcaactgccgggctttcgtccgaaatacatatacagactttcttcatctgacaaatatacaataaattacggaacgacccatgtctattgcatgaaactatcctttcatcttcacctcccttctttcaaattgttcgcggatgatttcaacgagttgtccgatgctgtcgattttgtgactcttaccgcaggctttgccatggaacaatggcgtgaagtacaggttaaaatcctcatcgatggaaaaacctcccacgaggacgatacccgccttgatacggtaatactcgccgtacatggcgtaatcatccgtagttttggtgaacccgtactccggcaacaagtccggcaaagtgtccaggatcggccggataacatccttgagaaaattcggggtctcaacttcctttttccgtttccgaccttttctgccggttccgttatcgtcttgcaggtaatgggcatcgaaacgatcctgatacctttctgtcagttccttaatatccatatcctttatacatttaattgttttcctcaagccactcttccagtgtcatggaggcctcgaaaccgtattcgtcaatctgtacatagccgtccttttccgtgataaactctttcctggtcaggatggttccgccatgatttaccatcaccgtcggttcgatggtcgccagacggtccccgtcatccgactcccggatatcgtatgcgtacagtccctccggaacggcattccggtcaatccgcatatccgtaaacaatgcaggcgtgtcattgatggtcatagactcaaaggtctcgttgccaatgttttcttttgtaatcatatttattgattcaaatagtttattattcctgcttgggaagttcaatggctcttacccaattgttccggtcatcaaaacattcatcattgatgttggccgtaaattccagcggtgtcatcttctcaacccgcgttgcggggttattttcgtaatcaacgatgattttcccggccggaacgtcacgttcaaattcgtccagcgggaaagagaatatccatatttcccggtctttatcttccccaagaaacgccttgaggttgtctgtataagcctggcatttgtcccacgaggtttccacgaatgaaatgatttcctcttccggtttgccggtacggtctttcaggaatgcaacggcattccctttccagatatcctgctcgacacagagttccagataacgttcccagactgtcaccagccagtccatgttaatctcatgcaggtggcggcaggtgaaacgctcccggctttccgcgttgtaaagcgtgcagcttccgtccgtgcgtatctcctccaaccggtacatggtgtataccggtatcccgtggccatacccgtcttccccttcctcctcgacatataccgtatggggcaacatattttccggcattttcggtatcgcacacaggttggctataacttcctgttccaacgctttttgtttctcctgtattctcattgtctatccatcttttagtatgattttaccttcttgaaataatctctgtttgtaacgacggtggttgcgtatattttcggtatgtttcttccggtcatatttatacaagccttttgccttgttctctctcagcagttccttgttccgctcttcgctttctgggttcacaatgaaggttatcagcctgcggctgacaccgtattcccgggcaagctggcgctggctgacagcttctgtcatgtaacggtggaaaatttcagccttctgaaaaggagtgagcttctgcctgcggtcatattgtgtcccgctgatgattattcccgagcttttgtatggcatggtgaagtctgtttttcgtttgtggtccatgaatggtagatgcgttgtttgccatctaaggagagtagaaaccagcggctataaatccgttccagcgtttcggtgtcgtgcccgtatatcggtcccagttcgtttgcaaacatcgccgctaccttcagcctcctggtatcggacagcttctcccaccagcggcaaatggtcttgtactgcttcacgtccgttacaaggtccggaaccggagcggaggagatatattccgcctctttgccgcacggtgcctgccagaacccctgttcgcaaagagcgcgttgctcgtcacaaacccgttctgcaaaggatttgagtgccatttggaatatctttctttccagttccttacgttccatggacagttcatgcacacccacgttcagcccgtgcttattgcgttcatccggggaaagcttgttgctcaaggctttcctgaccagttccagccgttctttcagagggccgtattcgttgttatctaaataccggttaaacagttcctgttcgtttccgggcagtatgaatatattttccatcatgcatcatttaagttatcggatgtgaataggatatatcgcagtggatagcgggtgtcggggtgcggaaatagccacgagatcccgtgccgtcaaggggcgcagaaaaacggcatcgaactcctgagtatcgtcttcacggatatctcggacttcaatgatccatgtgccttcatagcggcaccaggcaatcacctccaaaatcatttcctttctgtagtcagccggtccgtccccgaaactttcacgtatccgcttaattgcatcgtctgtcagccggacaaattcccctttgcggaacggagcttccggcgtaacggcaggagtcagcatctgccagtcttcatgtccgtccaggtcttccacagccattgcgtaggctttgtattcagcttcggtctcgaaatgtcgggttatcacatatcccccggattcggccgtgctctccaccgacgagatatccccggttttcctgtatatgcttacagtatccttaccgagtagaacttttactgttatcattattgcagatggtgtggttttattataaatggaactccacgtcttcctcctcgaactccgtgtcgtggtcctcgttgtacccctcgacggtcgaaccagggacataggtctctccgccaatcccataacgtccggcatcgagcagtttccgaagggtttcggtgtccccgtttagaatcctttcgatgtcctcccggctgccccggacgctaattccgagacgtagccagagattttcctctctcgaggtgtccgcctcttccgaccggtggcgtatgatatgataatcactccatccgtcggcatcgtttaccccggcgatgtaggcattgtactccgcctcagtctcgaactctttctcgtccacgacgcccccgttatccgccagccattcttcagaaggcagttcattgttctcttcatattcccgtacggcgtcctcgccgaaaatcgttgttatctttatcatgtgtctttgggttttgaatatttgttatttaatggttatcaaactcgtttgcccgaaccggtttgattcggttcgcagacagccacccggtttccggcgcgtatcagtttggggagatacacgtccaggtcacgaaaagaaaaccgcagttccttgacgcctttcccttgcccgtcgacgcgttcggcggtggcaatgcccaaaatgccggaagcggcgatggcatcatcctcatacaattcacaagattccccgtttcggaaaatgtacagggcatccgggtgcgccgctttcatctcgcggtattttcccatcatgtcggaaactcccgggacatttccgttccccgttacattccgggtcttcagtaggttcctcgtggcgtcgatgtcgatgaaattcgtccagccggctttatgaagttcgacagcagcttcccgcagggataccttcccgttctcgacctcctctttcagggattcgagaatgttcttgattttataatcattcatcatattttttattctttggttacattgttacttgttccgacggtattccggtcaaggggaaagcacccgtggcctccggtaacccgtcgatacactgcccgtcgtcaggatttccccgacaggtaatgcccgatggacttgtaacggttaggaatgttcgcgttctcgttgaaaccgttcaggcagtggagcaaggcatcttcgagcgtgacataacgacggtcgaaagtttggatattatccagacaataagcatttacagcgtatttgaaaggcgcgtacatcctttcgttctcccgctttaaaatgacaaaccagtcgaaatggagtttcaagcggaaaccgtcgctctcgccgactttcatcagccgctctttgtcgagaagccgccgcacgagtgtggcgtcgagctgacgggtatactccctgtacgccttgatacgggccgtgtaagccgcggcatattgttcgatgtccgtttctttcagccgatgttccgccgggtaaaagtccagcacctctttcgtcgtgacgggaattttcaggtcgtccaccccgatctcgtaggtcttgttttccaacacgtcgtggaactcgaacccttgaattcccatgagggtaaattctcgcgtcgggtcagggagcgcaagtgatttgagctcttcgaggtcgcggcacacggccacgaccggatacttctcgaccacgtctgacgggcctccgatgcggatatacgccttttcacacccgtcgtaatcaccatgccggacaatgtcgcagcaggtgtagttgggggcggcacgatgccgcgccgtatattccgtccaaagcttgtccagcccggcttttacttcgtcagggtcggtcagggcaacgttgccgcactggctgcaccggccgtccgacaaggcgttgcgggtaaattcgaggaactgtctggtgttcgggtcgatgacggcggtacatttcactccagtgccgccgcagatactgcatacgattgacataagttttttgatttgtgtatttattcgtacaatctttctttttgacgctttttcaaggtcatccggagatattgcatcagtttcccgcagggacacagggcatgttcccgttggcgggcataactcaggtccccgttggagagaaccatgccttcagcattgagacagaggtcgccgtaaacgtagttctcctccgtaagataaatcccatgaacagggttcggaaacccctccgtgctgcggccttcccggaaaaggaagatacgctcggcctgtccccggactccgaaaaagggatacggggaaagtgccgcgagcgtggcggcatgctctgccggatcatggaagcggtcgtcgctcatttcgagcatgtggccggagtcctgttccttttcctcctggtactcgtacagtgcggcgcaggcttctatgaattcctccgaacgggatgtggcagagccgttggttacgatataaaagtcattgacagtaataccgtaggcgcgtacccgttcgaggatatggcggatggcccggacgttaagcgacggctcgccgcccgtgatgttgaaatggtgaatatgcctgacatgccgcagcaggttgcttatatgtttcaaagggatatccacggattcggcatctccccgcatgcaatgggtacagcgcatgttgcaacgtcgggtaatctcgatgcagagattcttgatatatagttctctcatattcgatgtagttcggcttaggtttcatccgggatttcctttcccgtgtaaggattatacagcggtgtgttgccaactgcctcggcgtcaatagcgaaactgccacggcctacgtcgtagaagagttccagctttagtggcgttgaagcgatgactttctcagcctcggcttgtgacaggcctgaatacatcaggcatttgacacgacaccggaacatttccggattggtttccggcgtggtaactacatcaacgacctcgcacacttcatccgtgatggcgaagcggtcgggattgggtgtgccgttccttctagagccgtccgatgcggcatgtccggtgattgaatggttccgcaccttttcggcgggataggtcttatcgcctttggcgaaatacgacttgccggaggcgacacaggcatgatagattacgtcgtggacctttcgtccgttgtcaagtataattgtatagaccgttccctcctgcaagacaggaacggcattcggtttatgagacataagatttgtttttagctgtttatgaatttcggtcttgcacgccgcatgatgtgtaggtcatcgtaaccgatggctctcagttcggaaagcgggttgcggtactccttttcatgggctggccgtgtcatggcgatcacgcccgcatagtcggctgcgccatgctggccgacatgcatgtaggaggttatttcaccccgccgtccgctccacggtatgtccgggaacagggcgatgacctgtccgtcgggatagcgtctaaagaccaccttcgtcatttttcccgcagatttccgtgtcgatttcatagtccccgtaatttttgaattcatagtccacttcgctgataatttcgtcaacctcttcgtccgttatttcatcagccttcgggttgtcgatatcgagccgtacggtcaggtaaatggttcttgttgccataatatcatacattttttagtgtaacaaagccggcttatgacggaccgacggtatatttctctatcagccgcttccggtacgccttgtcttttccggcggcaaggcttgccagtttgcggatattccggttggctttttccgcgacctgctccactgtcggtccgggagtcatgaaatcacggcatccggcaccgcaataccgctgcttccccttgaccgtcctgccacaggccggacaccggcgcttgccgtcacgctccagcacttccagaatattggcatgaatgcctttccaccattcaatacggtctatgtcataatcgtagacggttatcgtgttcccgaaactgcgggcttcgacctcaacggcaatgccctcattttcaaggtaaaccttcaataccgggtcttcgtgaggctcacagtgcctgtcataccagatgatataggtgggatcgtccagttcgtcaggctctcccagacagagttccgtaaggccgttgttcacgagaatgttgcggatggcgtcttgtaaatctttgatacagtccattgatatttcgttttatggttgttcctcattcgtcagttcatctccgaagcgtggccgacgaactggaagatatcggcgtattgttcgctgtagatatagaatccgtcccgtttttccccggtctccgcatctattccgtcagcaaggagatattccccgtcatccgtcaggtagacatcggtaagcttgatacggggcgtgtcgtgcttcccgtacaaggttgtcgtgacggggaagttgttgtcatcgagttcctcctcttctgtaaggccgagtgatacgcggccatattgtgccaggaactccagcatgaatttcagcatggcttgctcggcctcgtgcagccgtccgtcgataaaggcgtactgggtggcgaacagatgcagcttgtcggcgctcattttgtccggggctttgcccggctccgcattgtctttctgtattttatccatatctgtcatattgttggtttcatgtttccagcggggtgaaggagacggtcagtatcactttctcgtcacccaggttgaacactttcaggcagtcgttactgatagtccttttcaggatgtctccccggtatcgggaattgcgtaccttgaaggtaaaatcatcaatgaacgagctgatgcaatgaagcacgtggtcgaattcttccttaccataccgttccatttcagggaagatgcctttcagatgcgcccgcaggctcaatatgtagttcggggtcttgcccgtgatttttcccgagtatgtgattttgtatttcctgtccatgatatgccgttccatttaatcgttactgtcataccagccctcgatctcatcgaaatagccgttcgagtcccattcttccagcaaggtggtcgggtacgtccattcaaggctgtaaaacagatcctggcacacctcttcattacccttgcacagggcgagcagtgagttatgcgtgaaacagccgtcactgctctccgacacacgccagtcctcacggtcttctgccgcgtattcaggtacatagcacacttcatcggggcggttgagaaaggcatcctcgttcttgtagatgtttccttcccctccgtattccagttcatagaacacaccttccggcgtttctatcctgttgccaatctctatcatagcgttaccgtttcgtgggtatatataatcaccatccgggaggagagcaccttgtcgcgtaccgtggggttggcgattgcccaatcggaatggaaatgcatgtccggaatggatgcggtgtccacaatatcgcccccgttttccagatggagataatccggctgatacaggtcgcaaaggaatttgccgtccgtatcgctgatggcgtatatcttgccgtcgagtgcggccgtcatctcctcctcgctgcggtagaccaacaggtatttacagccggtcttcatctcttccgcaatccgcttatgcagttcttcaggagataattcacgcagtcttgacacgaccgccccgatactttccacggcatcgtagctgtccaagacatcatggcaggtcgtttcaaactcctctttcggacgacccgcaaaattgatggtacggacttcctgcccgtgcccgccgagcaggtaaaagggcgtaccgttccattgttcctttctgacagagagcggccgggagcattcccgtgtctgccggttcacaacggcatacagttccagactttccccgcattccatacgcaggatatgccgggcgaactccgtaaatgtcatgattttgattccttccccgttcgccgtgaagaaatcctgtcttgtctgtttcataaatccgtttttttaagagtaggtaatcgttttgtataaggggtggaatactcacctcgttttgaaaaaaaagaccgccgcagccgtagccgcgacggcccgtcatcattatggcatgtgatgaacaggttctattttcgttattcggcctcgtagtacggtacgccgtgccttaccactgctttttccatttcttcccaccagatttcactatggcggtcattgtcaaaatctatgggctttcttttaccgagccgcagccggtcccgtgtctccatttccgtttcgtacacaatctgttccatttcttcgtccgtaacatggtaggtatcgaacggctccggcagagattccaactccctgcgtgacagctcggattgcccgcaggtgaaaaccttgtcatagaaagcgtcatctttcggcggcagttcgggttcctgttccggcagcacatccaaataatccgactcgtacaggtagttttcgtcgcgccccttcgtctgccggttgttcttgaactcttccagatcactttccgtcaggcggaattccttcttcttacgccgcaggtactccatcatgttttcgagggaggagaacggggctatgagctccatggaagaacggttgtgccaggcatcgctccggtacagcaggtagacctgcgggcggttccgagccgcctccttacggtattcgccgaactcatacagggcgttgtcgaaacttccgaatgccagccggactttgtcttcgacggatatggactcccggcattcctcgaaacggcgttgcacgtatccgatgaaatccacgtcttccagagtctccatgaccgtgctgtcatcagtcgagagcgcgatgtcagctcctgcgaaattgtcggctgacagcacgtgtttctcttcattgtattcgtcttccgccctgcagacggccagaccgggcgtttctgcctcgatctccacgaccttacggagcgtctcttcgatagctatccggtattttttcattgtatgatgtttatttgtttcagttcacgtttgtagtttctcaatgacggcttgtgccctttctcccttacgatctggcgcatctgtgcaaaggtgtatgccttctccatgtccaggccgtagtccgtggcgaatgccgtcattccgatatagcagaagccgaacttccggtgcagcatgtcggccgtataaggagtcatgtcttccgccaaggttacggggacagccattccccggatcttgaacttcaagccctcgataagggtcccgcagttgtcgctgtggtaggtcaggtccctgcggcgggcgcagtaaccgatggtctcacccatgaaggtgttgcggaagatttccgtacggttcaggtccttcaacttctcgacaccgtaatagcagaccgcctgtacggctttcaacgctttgtccacacggggtttgacaaagcgggggtcgttttccgccacgatcttttccagccacgtgcggtggaaggttccgacaggcacgtcgaacaccttctccggcgtgcagtattttgaatccgaccgcgtcatcatcagatgtgccgaggacggctcgtattgttctttcaggtaaaaggccagacaggtattgccgactttgcagtaagtatagtcgtcacggctgtttttcagcgacagcatcgtggtttccccgccgtagaacttctcgggcagtccggtctgtcggcagaactccgtgaggaaatgtccggggatggcatgtgcataactgcgctcctggtagcactccttcgccatttgcggagtgatgaaccgtttggcaaagtcacagatatggtaatgaccgtaatcatacgccgcctgcgtgttcgcggagctctggaactttttgggcatctggcggaaccagcggaaactcgtcccgtgctccatgcagtagtcgacaaattcccgcgtccatacattttcaggaaattcgggacagttgccgtttcttcggatgaatgccttgcacacttccaccgtgagcagggattgttcagtttcctcgtcgatatagcagttcgtctcccgtttgctgttatcgatggcaatgaccagtctttccggtgtcttgaaccgcttcggcaactccccgaacatgtaagggtgtttctccatcagccggtccgccagcatgtcgtccagatataccgacaacggcttgaaaaactgggggtctgtgatgaagttttttccttcggtcgaacagacagccgcatggagaatctcataggaatagaaccgggcgggaacaagcgagaggtcatgttccgccatcttgcggtagtatgccgcagtcttgaaacgggacggcacgacggcatcggtaaccgtgctcaatattttcatcccgtcgagcatcccgtaatagaactcttgagtctttacctcaacggggacatatccgaggataagccccgttttcatgacggcgtctgtcctgctgtccgtgtaatacgggtcgtaaatatagctgcgcaaggccaggtatgccagttgcgcatcccaaaggcgttcaggtatgaaggcgagaatgtcgaaatccccgcgtccgtttcggatgaccgcttctgccatttctcgggtaaccattgcttcgggaacggccgtgatattcttcggttttttgcgcatggcgtagtcacagactgctcccgaacggtacgcctccggaatattgcgcagctcgaagctgtgccagctctccgtgctgcccgcgatgattcgttctatacgtccgggtgtgaggaaacgtcccggaatatggctcagcacctctatttccttgctttcgacggctgcttccacgatctcttccgtgaacaggtgttccggcagccattctatggccgatacgatgttattgtgccgcatacagtttctttttaaggttggacgaacggacgattctcacaaggcggcacccccggtagacatagagtatcctggattcccgttcggcgagttcctcaagtccctgccagtgctgcggtgtatttatcttttcgagtcggacatggttgttcacatataccgtgatcggtttcatgctgtcatgggagggcgtatcttcgacgaagagcggctgttcacagtattctcccttgtccatgacatgccatctgccgttatcgaacaggaggcacgtgtcctccatgcggccgaaaatgtctgcgttgtccgcgatgcgtgatgcggattgccgcggtgtttcccgtccgtcacggatctttgaaaaacagtggacggtatcgccggttcctgtccattttccatagggtgacggtcccagtttttgtatgtcgcccagcgacagcagggcatctacccgtctgtcattgggatagaacacccggagtttcctcacaaggtcttttgaaagcgtctcatggagcgccttgatgtgccggacactgccgtccggcaacagttttccgatttgtatgctcataatagtgctatctcttgttgttgaagtatagccgggtcgtccttctttcgattgacagtccggcttgaaaattatgatttacagaagtcttcggactggtatccggccatgtccggtacggaaccgcgtgtcattccgtcctgtcgtcttcccgtcttttcattttcagttccctgccggttgccgtgcggcagagcggcagtttcccggaagcggtttgcttgcatccctcgacgagccgtccttcagacaccattttcccgtacatttccctgatataacggtatgccggggaggtgttcgaataaacggacttcccacggagtgtcttgacacgcagcttttcgacgagtatttccagcacctgctcccggctcttgtacaggttccggcgcttggtgcggaaggcgtcgagaaagacacccccgatagtcatgtcatgagtcttgtggtaatacgcgagttcttcctcctccgtcaggtcgagaatctcgccgtaagtgtcagtacgtaggtaccggaaggtcgttccttgtgccagaatcttctcgataagctccatgtgctctttaagaacagggcccgataacgattggggatgacagtacaggcatgtctttccgagatacacctcgggacaaccgtctttgtatttgttttccttgatgctgaaccctgtttccgtgaaaaggcgctttacctcgtcgaagaagcgtccggctttctcttccggcatgcgaccgccgtcatagccggactcgacgcggaagtatgtgtcgatatatatcggtgtgtccatttacagttctgattttgatatgttatataaagcatagcccggaacctcccgctcgggttccgggcatcgttgaaaatattctcatagacgtatggaatcgaacactttgtcgatgtcctcctgcgccagcccgatgtagcgccgggtggtttccaggttggaatggcggaatatctggttgagcaggatcaggccctcggccgagcgtcccatcagctcgtagacatagcgcccgaaagtcttgcggaaggtatgtgtggagaatgccctgatcggcagcctgtaccttaccttgaataccttgagcagcctgttgatgtattccagcgagtaaggtttcccggtacgcgggctgagaaagatgtactgttcgggggcgggttgtccgagcatctcgtacaggaaacggttcttctcctgcacgtccctgttgaacttgatcaggcggtttttctttgttttctgctcgatgcgggtcatggtgctttttcctaagatgtctttccagcgcagggtcctcacgtcggaggccctgcatgccgtgcagaacgacagccagcagtaggtctcccacaggtactcgccgtccttctcaagcccgcggaccagcctgttatattccgctatgggcaggtagtcggctgtcgtcagttgtcccttgattcttgtcacgtggcagccttttaagattccggcaacccttccgagagcatcagctcggccagcgccccgttctggggaatcatggccggaatgtccgtacgtccgggcttgtagatttcggttgccacgttatagatatcccacgccgtgagcgtcttcttctcttcggtgagtttgagcaggtcctcggtgaagatggaaatctgggactggttcaggggataggtctccaccttggacgaaagacgcttgtcggaactgtcatgcgatacgcgcaatgctgtcagcaatccgatgtaggcgtacatctccaccggggtaattactttcgctttcaggcggcggatgcgttccctgtcctcgttcatctgtacctcgaagttcgagagccactcgtctacacgaccgaaaagctcttcggtggtgactttgtctttcccgtagttcgacacactgcgttcgggggagaggatgcactggttgtggcacaccctgacgcacgggccgatggccgcctggatgccgtcctgatggaaggcgatgacaagcgtcgtggtcagctcgtccgtttcccattccttaatgcggatggtcgtataaacgcggcgcaggatatgcgcctcgacggccatcgccccgtacttttgttccacctggggcaggacgaccacgccgggctgtgccttgttcttgttctgggcggcgaagatttcctccacctcgtaattcaggttgtgtttctggcagatgtccgccatgcgctctatcacctcgtaatggtagattcccttgagcgggttgccatagatgtcattttccttgtgtgtgcgccggagcgtgtcgagcgtcatcacctcgacgttgttgttctggaaatcgaactgcacgggggcggccgttgttgctaatgctgttgccataatgattgatattaaaaaagttatacaataagaaaggcggtgaaccgttgtccatcgcctttccggaattcattttgcggtttcaggcaggtaacgcctgcatatcaggtccgtgatactcgggtaatacacgttgccataagttccgtatggtccgaaacgggcaaggaagcggaagtaaaaatctaccggacgccggtagctcgtctgtattttggttttcagcaggcggtaggcgtactcgtcagaattttccaccttgaccttgcgtccgttgaaataatagtttccctccttatctgaagaaaacgatacctcttcctttgccggacgctcgccggcaacgaccctgaagaagtcctccagggagcggcaatcctggtattctaccggaatcgtgtcgccctctcgcagtttcacgtccagtttgtcaagcagtgtcttgatggcgggcgtgtagatattttcggattggaagcatcttgtatcccgccagtatttctcgaaaagagagccggtttcaaggagtaggaacagggtttcacgcgctgtctgcggtttatcggccagatatggaatatactcggtcaccagtatggaaagtgaaagatactcctccggttgcagttcgctcttctggtgcaggttacagtgcctctcgagcagggagtcgatgtcggcttcccgcaagctttcgtccgtccataccaggcaaccttctttcttgcaggcgggacatttatccgctccatacggcaggagcatcaccttgccgcaatcggaacaggtgaccaggtcgcctcgttccgtataaacatctaccgtttccattctcaatcctccgcgtaaggccattcaaggcagcagtcattgcatacggccacgccctcgtcactcagaatgtcaatatctgtgcccccacattcggggcataccggtacctttttcttgtccattcgtcgctctgccgcttcttccgtcagaagcagcggcacccagtatgccgatgtgccgaaatcccgtatcccgttttcatcctgtatgggttcacaacctttcgttcccatgtatttctgggagtccggccaacacacggcacggtaacacttgtcccgttcgggagatttgccggtatggcgtatatagtcttcctcgggcacgtaaagcgccccgttctccccgcttccccatgccggataaccggttccttcttcctcgaaaggagcactttcctcgggaaattccacgagtgcatataacttgtcatcccatgccagggaacactcgccgcagtggaaccgactttcgtgaatatcataacggatattttccgaattgcatttcggacagataatgtcttttgtttttactttcgggaaactcaggatttctccggcaatgatttccatgctgggccagaacaactgttcgcagtaatcgtcggccatcttttccgccagattctgcatgtcgtcatcgctgatcttttccacatcgaaaccttgtccttccaggtcatcgcggtggacggacgtgatagggaaatacccggcgttcagctcccggataaattgtctttcctcttctgtcggttcgggtaagttgttgaaatattccctgagccgttgataaagttctcttaccataattatattcctgtttttaatctaatatccaccagtcgaggaccagtagttccggtccatgattttttcaagttcgaggtcggaacgttctttccagaggtcgaagtcatcaagcagctccgttccgtcctccagagaaagcacagtatcctcattgtcaaacagatagtcttgtatgtcatatccggacggataacggttttcccggatgatttcttctgcaatttccttgtccattcggttgccattttttcagttcgccggtattgtaaccggattcatttgttttgtcttttccttgtaaaacctgtcgatggcaaggaagtagtcctccgcatcccaatcagtgcccgcatgctcagtctcgaattcttccgcccactggacgatctcggcattgacggcacgggagtccctgtcctcccacaggttgtccgccccggcattgtaggcaaggtccacgacagcctcctgcaacttgttgtagccgttacactctctaccgttggaacgcagccataagtccacgtcgacggcatcctcttccgtcgtcccattgtgcaggcacaggcactgcccgttgccgttatggcatacgaggaccggccgtttggtgtcggggcatatccgtaccagcagctcattggcggcaagtgtttccgtatcatgcccattgagcattgcaggaagcgcctggctgaccagactcaggatttcctgttcctcctttgtcccggacggcttggaagccaacaggttctgtatgcgtttaagaagattgtaaatcataatcagcagtcattatgttctttccagattttacgtttctcgtcatagcccttgttttcccaccattcattgcaggtttcggcaaacccctgatggttgtctccggccggacacttgtcctgacggcaacccgtgatctgttccatttgatttgcgtccaacgagttccaccattcctccatgcgttctttgaactcttttaaagtacagaatggctgatggtcctcgcattcgtcgcaccagttatcatagcggtctatacccgtggtaccgatgaatgtacgggcattcggatccacccatgcctgggtctgtatattgtctgaaccgcacccctcgcatacgacaatctcgtcgtcattgacatcagcggagatgaacccgtgttcttccagccagtgggcaatctcaagcaatccctcggtctgtacctgtccgatgggctcatcgaaatcctcgccggcttcgccgttgagcgtgcagagcagtttgccgttcccgtcgatgaaaagttcataaacggtcgcactttcataaccgccgtatccgtaaaaagcggaattgtggaccaccactatcggggaggtttcatactccgctgattccgcctcccggtaatgtacgccgcagttgcggtagaacgtgccgatgatgttgttctccttcttcacggcgtcgcggattttctccataagtgatcttctgatggagatgatactgaggtgcgcataatccttacggagacgtctgtacacttcctgctcgaagttgcctcgaacagagtcgaaaggggatacgccggcgttctcccggatatatttgtcctcgttaaagttgtagcgccggcagacaatattcttgacgcggcggaattcctctccggcaaatttgaggatactgttctcgcctagcgaagtcggaaaatagcagcggggcatgtgcactgtcatttcacggtaaagtgtgtcatcgtcttccggaaaggttctgtctgtttccggctttgtaggtttttcctgttccatgttgcttgttttttatctgtagttgaacaatttccggtttgccgcccgttgcatggcggtcaccatattcttatgtcataatctttaaaatagtattccaactcttttaatccttccaaagagtgcagctcgttctttccggtcacttcgatgtcgacggatactgcattttcatctttgatgtttactttggcattgtcaaacacgcatcttacatattctgcaatgcatgaggcaggcaggtcgttttttacaatattaagtaccatattatttattgttcattaaatgtttgctacgtccataaaccgggcaccgcttgcggtatctgcattcgccccgggccgcgtcggtatgcgcccggtgccattcatcccagctcttcactccattgtctgtaaggaatatgatcagttgcatgcagcagaaaccgcgttcctcacgtttccggtcatgaaggttggccagcccgttatctttaggtttcatacaggtttgatgttacggcaggtttgctcgaaacgccttcatggcatatcattaaaaccatgagacatgcacataggcatcgctttggtcactgccgttgattagacaatcaagtacttcgataaacttttcccggtccatcccggcctttgccaggcaggaataaaattcttcggcattctgccggaaggtttcatcctgttctgagatatgttttcttagctgctgcagacccgaacgggctatttcgaagtcatcggtataggcgtcttctgcggagttatcaacttcgaacattgtcaggatatcataaaagatatcctgaccgcccccgccatacatacccggatatttgtattcgatttgccaaactctggctacatgtagtttctggccattatcttttcatttttcggatttgttgtcttatgcagtgcagcatcaattcgataccacggatgctttcctcattctctttcagtttgtaatagtaggcgttcgcttcgtcgtagtcttcccgtgccttgcgcaatctgcattccttggcgtcacggacctgttcatgggacaggtcgtaaccgatgaactcgtccatgaaacaggaaaccgtacgcccgtaatagtggtccgtgcgggtttccaccgcagtacggatgatgtcgtcgcaccgccttccgagtgtccggagtacgtcgctgatatgccggtcatggtactcgtaaccgaagaaacgggtataccactcgtgttcctgccggtttgtcttccccgcgtaatactcgtaccattgggcgtcgcacttggtgtgcctctgggtaaccttgaatatggcatactcttcaccgatccatgtaaaacgtgagagtatctcactcgcttcttcctcatagtagctatcccgccaattcaattcttcggtctggctgagcgggaggaatgactgtttggtgatccactgcccgaaacctttgtgcgtgacatgcggaagcactttcacgaccttgctccatgcctcgttgcaggcttcatccagtgaagggaaactttcaggaaagcgttccctgtccgttccgtctcgcaacacctcgttccaatctttgtcgcagacaatgagggtgaggtcctccctcacatggcagtcgcgttcgcaatagccgtagggagcatcgcagagcgtgtaccactccttcggtccataaccgtcgtcacgtcccagatagcgtttgggcttacccttctctgtctgcacctcccacacttccgtgcagtttccacggtcgatatggtgcaggcgtaccctgatttccttgttatctcgtttttcttccatgtcgttcatttttagtatggcctgtctttttcttttcgagaatccggtagatttcttcaaggtcatgctcattgtctatcggttgcccgtattccgtatccacgatgaccaccctggcattggccaggtgacatcctgctatcgtcttgtcatagccgctccattcaggattgatttctgttaccgtgtcaaattcaagtccgtatgatgtcttcattgtatttccagttattatgcgtatttttctattttatgctaccgctttgttctgcccgtcgataatatgcctgcattcggcttccagttctttcatacattccgtaccatagaatccccaacaactgtccagttcattgtcatcgtcactttccggcatgatgcgatacccgaaaacttccccggtatagtagttgtcaagggtactgatttcgtcttgcaggtatccctcgatccgcttcctgcgtttcgcggtgatgttcttccacccgtattcccggcgcaccttgtccaacggtaccgcgatgattccgaaaaatccggaatcccacgggcagctgaacggcgaggtggatattgtaatgccgccatggtcgtagaggtagaccggcagggcgatatattccttcaggaacgattcccggaaatttccgatatgcccttcaaaaaccttgtcgatatcgaagtggtcatcaaactccttctccgggcggtagcgacgatgtgccgtataaagcgtaccgagattgtcatatgcttcacgcgggcttcgggcgtcatcatcataatagatgttgatgcggtacccgttatatttgatttgattatatagattcatttgcctgggtattatgtcttgttacaaagtcttacaaattgttccgtaatctcgtcccgctcgaactcgtcgcagttcaggtcgaagaatatacccgaagccgcgagcatgtcacgggcttccccgtaggtaaggtcgttcctgtgcctgtatctgtccaccatgtcccgatgttcggcttccgcccggtcgtgcagcctcattttatacagcctgtaccatgcggggaactgttccttggaaaccatattttccagctgcaagtcccggtatcttcccggtgccagcaggatgtggctgtcaatgtaggacttcgcctcggctatgattccctccctggtgaagggacggtgggagcgtgccgtgaaatgcacccatccaccatgcaacgggtgttcgatttcaatctgcacaccctgcctcctgacatgtaccacgatataggcggtctggccggggaacatatcgtccttgaggctcactccccggcaggccggcgggtcaacatggatgtagtggtcctgccttgcgcccccgaggaacctttcaagctgccgcatcgactggcggtagatgaatgtccccacgcggcactggcctcggcggatgtcgccgtaatagtactttcttgcccttgctccggtaatgcgggactcgtccgatgcctcgaaatagctccggtaggtatcgtccgtacggcagaaatcatatatttcctgaaaagtccttgttttcatttgttactcctttttatgtattgtcttcttccggcgggggaaattcccccgtcctgtaaaatatctctccgagacggtcagcctgttccgccagacctctcttccggacagccgacacggcatcgcgtgcggccttttcgtacatgcccagcagtaccgcctcgggcaggcgtttcgtccgccacacctcctgtgcggtggcgagcatctccacctcgcagcccagatggctggccgtgaggataatgacggcattgccgatgaagttcggtacgcgttcttcctgttgttctcctttcattgttccgtgcctttaatccgtttcgaactcgtcttcatagacctcgatctccttcctgctctcgcagatgcgtaccagccaggtgtattggagccgttccaacagttctatacggcgatagcccttgtagggcactttcagcgttgcaatgtctcccggtttcatgtcaggcgggtatttcaaactggacatggaaatggaattcgcttatcaggctgcaaatctgcggtactgatttaggatcctccccgtaaaggtagaagatggtccggcaacgtgtcaggcatcggataccctgttttcgtaaccggtacagcaggtaggccctgcgtcgtagttgtttcttgctcatcgtataaaggattatgtcgttttgattagaatagcggtgtggtcgtcaaacaggggcatctctttacgttttcgatgtaatgcctccattgaaagatgctcatcttgtgttaacagggatgagcatcatttcaatggagggagtactaatttattctgacccgccacaccgcgccgcctaccgggcggatggtgatgacggcctatttcttacgccatgccgccatcttctttttgatgttgatattgttgtccgccagcatttttttcaggactgccagcaaccgccagccttctccgtttttatactcttccgccttggctgacaggaacgtcagtgactggtacttgtccagacgccgaccccggtcattgacagccgtgcaaccgtggaaacgaatcaggttctgcatggtaaagaacgccccggctcccttataggcatccatccatgccttgctttgaggagtgccccatggcagccggatacgacggtcattgaactgtctgaccgcgttgtaaagctgtgtggcgtccaacgcgtgcctgatgtgggttatcgcgatggaaagcgggtagtacagtttggattgcaggtcctccacgaaaatattacggccgtgtatacgcttgtagggaactcccttgcattttcttgtttccaggttgcccacgtgttttttcagcgcgttgacatagtcgctcgcgatggccaaaaccacatcacggttgaaccagcggtttctctcggcaaaacccgtgatgtccttgtgttccatcttcatctgggcgtgcagctcgttcaagagcattttccactggtaatcatagcctttccggtgaatcatctcggtcacccctgccggctctttttcacggtaatgcgtgtatgacatcatatggaacatttgtgccatgacccaccggcggaagagtcggttgttgggaacggtaccctgtgccatgatgctgccgaatatcgggtcgttgtcatccaggatggtaagtttcccgtctttgttggaggcgatatactcgccgccctcggctccctgcatggcgaacaggcagctcacgtccacaccggcaccgcggagtgcctcgatacgctcccgcgcccctttgggaagtccggcaggagaattatggccggccaccaccggatagacggtgcccaaatccgaattcttgccgataacggtgcccgtggcggcaaattccttgtccgcgatggcgaattccgtgccgcatccggggcacaggacttttgtttcttgtttctttctactcattgtgaatttgttaataattgattacttccgggttccacccattttctgagtatcaccaggtccttgtctttttcgctttgccagaaccatttgcccatcgtttcgggattccatgtgaacccgcctataatccggcagaggatatagaattccagctcgaattgcgcggtatcccggtgttgcccgtacagcatgtccccgtcctcgaggtcactttcgggcaatgccatgaaataccggcgggacttgctctggctgcgctccgatggtatcgaatgtttatagcggcggtacagctcctccacatccgtgaaaaaatccccgcagccgtactccggcaaccacggagcgccatcatacctgccgttccgtatcatgtgtctcccgtttacttttaaacttctggactggaaatcaatccggaaatttgcgccgttctctatggcggtgacggtttctcggtaaatatcttccattttctcacctgtttacaattaatggcactcaaacccctggcgcgtatctttatagtcctgataaatacagtaggacttcggtcctgaaccaggtagttgcctggctcaggaccaagcttgaatactgtatcttgaatttgggtccctcgtgcatatgcggtcgcgctaccttctgttcaggggactcatccggacggcacatccctttaaaaacctgatacgggccgcgagtacagctggaacctgtgtcatctgtcgtgttagcaggagataacacaggctccagccgtgtgaattgcggctctgttgaaatcccggccttgccccctttgccctgtgctgttctttttgcggttcccggaatgccggcacgttcctttacaggtccgatgtctgctgtggcggaagccggaatggcgccgtcgtataacgttagggatacgacggcgcgagacgggcttatcggggacagcaggctgaatccattcccccgaaccgcacgttcccgtgctggaaaagactgaaagttctcataataccggcacatggctttatgcttccgatgtatcccgcgtatgggtcttctgcggagtccgaaggcgacggtcagccgccttcagactcggaaagaagacgttggtacgcgggatgcccaaacctattccttgaactttcccggtgtgctccggtaacgggtacgggacagacggcacatgactttaatttcccgatacattacaggcgcagccagaatcgagatgggattaaccgggtgttagaccggttaatctcgatatggattctggttataagcctgtaacgttgaatagcctgcccgtccacccgttctgccgtgtgcccggcgtaacttatagcgatgccaccagcgtgttgtacaccgcccggctggtcagaagggcgttacgcatgcagccgacagtcaggtaacccggtatgtcccggtctgttttatcgcggttggccttcacgttgcgtccccgtccccggacgatgcagccatccggtttggttcggacatatcccagaccgccgatcttgcacctgcccgtctgaacggctctaaagcagtccatcacgaacttgttcagctcgttgaggtcactcttcacattacagaccggcaatacctgtatcgcccagctgaactcgcccttgtacaggtaacggttcacggcgtccacggcttttgccagtgtcgtgtcccggcagcggattgtccgccgctcgatctcgtgctggaaggtcttgatgcgtgatgacgagagcgagaccatgccgcccttgatactgaatcctaagaacttgaaccagacatcggctgccaggtattccactttcttgggatttagcttcatggatttatcttccaggcgtttttggagtgtgtccatcgctttttcataatccttgccgataaaaagcatatcgtcggaataccggacgtagtagccgttcatttgtgacagttccctgtctaggtcgtagagcagtacatccgccagccagctagccacagcacaaccctgtttcaaggattgatacttgctttgcaaccggttatcttcatcgaaatagaggtccgagtggtaatatttcctaagtacgtctatcagggcagactggccgtgtttggcctccaccttgtcgaacgcctcgtcgatgaaccgtatcggaacactgtcgaagtatttggaaaggtcggacttccagcccagacagccgctattgccggtttctgtcatccggtggctgacttccgtaactaccttgccgcaccctataccggtctggtaggacttgcacgaagagtgcagcatctccggcatcaactcgaagagcaggtcgttggcgatacccagtactacgcggtccatcggctcgtttacgtacactgtgcggaactcaccgttgtccttgggtatctgcgccgtgtggggaggggaaatctcgtactttccccggcgcatggcataggccatcgccatacgggtatgctcgtcggtcagccgaataagttggtctttcctaatgtctttcagcacgcctttctcaatggccttcgtccaccggcctatgtcgaagaacatttgcaatatcttgtcttcattcatggcactcaaaacttttttgggaaaggataaaattcagtatgtccatgccggattctacgtcacattcctgctcgtactcctcgcccgtgtagtaactgtaacccatgatgaagattttcccgtctttccggagcgacgcgttcgtgatgaccagttccacggggtcacggtccacaacatggagataggtcgaggattgttcaccgttgtcatcaaggctgccgccacactcggaaagcagcttcacggacagggcgtaacatttttcattcagggctttctccgccacgtgatggttgttcatctcttccgtaagtgttcggatgcggtcaccgcgtctctgctcgggaaccggttcgaaagcggtttcgaacatccagacaggcatccatttatggaagacggcgggtcccaagcggcatatgtaaacttcatcgttctctttctccgtctccgggatatccattcccgaggctcgtgctgccgctacgctcatgcgctcgaaaccgccgaggcaggaaggtgccgacttcaaacggtagggacggatgtttcctacagggacacccattgacataagtagcatccccttaaaagtgtcggtaacgggagtggtttgctgtttgttcattcttttattcattttctggtctttgtacatacattatgatttctcacgcatcctccgcaagggccacaagccgctcttccggcagcaggaactcctcgtccgtgaagtaatagcagattttccggtccacggcctccgcctcgtccgatatgggtgcgccgtctttgccgaccagcacgtcttgcagacccgttacagagaccagggttttgtattccccgcccgttccacggaacagcgtcagttccctgacaaaatattccctgtcattccatgtgataatctcaaacatttcctccacttccgggaacagccggcacaggaccggaaacagtttgcaggcatcgctccggagcatcaggaagacacattccatcaggcatagtccggcatctttgagcatgggcagcaatacgtccgtgcctgctccgtttgcctctgccactatcagggctttccagtatccttcctggaatgagtccgtccaagggatgagttcggctgccctgacggaataggaaaccgcgatttcttccggattgtcctcgtccgtggaaatcagtcctattttcgtgtcatcttcgacaggctcctttaccggcaggcagactttcattttccggaacgtgtccgtgtcctcgtccgcccagttgacaaagccgccgaatcttataaaatcatatctgctcatttgtcattattgtttattgttatttaccttacaattcttccggttctccatcgttgatactccggtagaaacggtctccgtccgcccacttcttggcggtgatagccagctcgaaagcttcctctatggaaaggccgtcggcgggaagggcatcaaggagttctcccatgcatacgtcattctcgcgatactctttctgcacctttccgagtgtcattctgcccttgtccgtctttttacgccacaaaagcatctgttgtatccaatttttcatgcgattcttttattaaaggaaatccttggcataactgcgggcttcattgaaagtgttgaagccgattccactcatgcaagagattgcccagtatcttaatttcctgctttcggcacgggcaagatagatttgcccgatacgaatcccgtctttgagaatgtcatgccgcttgtcttttgtaatccgtaccatgttccgacattcacttgtccattttccaaaatccgtaatcggacccgtcaccgagatgagcaccgaaatagtacccctccggtgagtaactatcgagcgtgtcgaacagcgattccagcaatcccgccgcgtcatcgctgttccaccagtctgcttctttgtcctccatggcatgggcggggatggcattcatcacctgcacgtactccggtgtgtcacggataacgtccaagaacgccggaatcaggtcctgcgtgcgcatcgtgccgtgggagatactctctcccggcacggcatggaggcggttttgtgtcctctcgtctatgaacatggcatttagataaagggcagacgggtatcttccagcatggaggccagcatttgacacatctcgtatgaagcacggttgcggtcgtcaatgcagcgtgaatcacgccctgccatagcggtaatggaagcctttaccgttctgaagaatgtctgttccagtgtcttgtggaaataaggaagagcctgggcgaaacgttcggacttgaatcccaaatcgttcatggcgtattccagctgtttggccgccttgtactcgcggctgttctccaggctttccggaatatcaccgaactgtgcggtccggagctggcgttccagttcgatgacggccaccgaaagcaacagcttgatggcttccgggttgccgataccgtgtttctgcccgtcagcggtatggaactcgatcaggtttacactgttattctcttgtaattctttgtagcatgcgagggtcttgctgagcgcttttgctttctctttatccataattttatctgatttgattgttattgcacacaagtacgtccccaacgatgaagtctttcgacgccgggtgatgagcacggaatatcctgctcgcttcaagattgagggacagagggataaatttgccttcctcgttgacgaccattgtcgtgttcccgtccagttccaccagttcgatgtagccgccgacaatcgcctgcatctcctccagcgtgaagtctgagccattggctggctgcacgggttggcgtgttccgtccgttttgatgatttctgtcatagttgctttgaaattttaagattcatgactcgccagtatatccaaaatctgttgcaaagggaatttttcagtccagaatcgctcgtcggtatgtttgccgtacgcccggtatctggcttccccgtttgcaaataccgccaagatatggctgaccagcacattgtccggcggaaccaacctttccagttccgtttcggtcagttccacgaagcaccagttattgtcttccggcaagtcctcgctgcccagtatcccgtcctcgtccggctggtaaaaaccaaccgatatgtcataaaagttcaaagactggaaactgatgtcatccttgaatggcttgacggcttccagcctgccggactgtgtctgtctccactcttttgacaggtacacgattgcaaagtcgcagcaatcccatgcactgtcagttcctgccttgagcaggaggtatggggtaggttcatttgagattttcatcgtatttccctccttttatgccacgcgtgataccgtttcacggtgcgtagctggttaatgatatggccaaaaagcttgcgtgaatagatgcggtaatggaacacagccgaatactcgcatacattgccgtgaaagtccacgtgggagcggtcatccgcaaagtcgaacaagtcgccctggatttccagcgtgtatttgttcttccgtagccagtcaaaaaactcgaagatgtccttcttttgggagtagaaagtacagtattcgtagcggtttccgcgcaggttcctcagcaatgccgccatctcgttccgttcccggcggtcgccaaattcggatcccgtccgagtggcgaggttcttcaggaaatatattttacctccatactcgaaatagtacggtatgtaggtgaccgtctttttgtaccaattgacatatttgacaaaggaagccttcttgacgatggcgggatgcaggtttactttctccatgtgttcccgaatctggcggtagatttccacattggaaagacgtacgggacgttccgcccggaaatacctgccgtccgactcgaaacagagcgcgtacaggtttcggtaatacggttccccgacaaagaaccagtcgctctgcatgcgggccggaggcaggcattccagcagttcgtaataacgttcctccgtaatttcatggaagggcttgcaaagtgcccgggtataacgcttcacaagcagtgtcatgcgtaccggtgatacagcgaccaggtacgggttcttctccctttcgcgcagtgcttccagcgtctcgccgccgtagtcgctgtgcatgtcatccgacatcgacgtgaggcatgtcccgtcgaaataacgtgaatcgatgatgtatctcatgggcactggattaaatggttattttcaacacctgaccggcggcatattcggcattgcgggtgagctggcgctgccatgcctggttgcgtggcgcccacttgaaagcgttacgcttcaaggtcgtacgcatatcggtatcgggtattttgtcgaagaggatttgcaggcggtcttcttcgaagttgtagaccaccttgccgccatcgaacggaatctcacgattttcacggcttgcccgttcctgctgcttttcccgcaccttgcggacgagttcgggatacttgaagattgaatggcgtgccgtgacgacaggtttcttgactttgtcgttccactctcgcagacgagcgacggcacggtcgatgatttccacgttgccatggttgacataggtggagagtcgcccggcgaggttgctgacgaagagagcccggctatagcctcgtgccgtacccgtatcgataccgtgaatggtcgaggcggcatcgtcgataaaggctttgaccttctgccactcctcctcgagacgctgttcttcgggcttggccgcttcggtagccttgcgaatcgcttcgagtgcacgttctcgccattcccggaacgccgtgacgctcttggcgtggctgttgcaggccttttcgttgcggcccgtgttgaagcgtgcaggtcccgtaatcatcgcgctggcacaacggctgttggcggcgatcatggcagagaaatagcgtttgtagttttccatgtaacgttcccgctgctgctcgggcatcgactgcaaatcctcgtgcagttccttttcgtgcgaggcgatgtctgactcaccccgctcgtcgggtgagaaggaggtgaggttgtaggagctgcacgcctgcttgaaatattcttccagatagcccgggtgcgccacttccacaacttcccagtccttgaagtccgccggggcgaggatttcttccttgcccggattccctacaagatgggaatagctgcaatacccgtgtctctttcccctgaaaagaaacgctaccggttcgctttccggggcatccacacgccgcaccatggtcacacgatgggcattttcctttgtcaataatgttgtttccatacctttcttcttgatttcgttatttgattgtttccgatttttattgttgcttcatccgggcggcatggtccattacagaggcgaaccccacctcgatacctatctggtatccgcccttgatggtcgattccagctccgcctcgctttcgatcagggattccgaatcatcggcataaagcctgtacagggagaatacgtctgcctcccatagcttccgggcattttccgccgatacaagcagccacacgaaaccgtcctcacgggttaccttgacggcggcttcgctatggctcagagtccgccactccttgatgtccagtgccaccctccacacgatatacatcagcgcatcgtggcggcttttaatatcaggggaatcgcacaggcggctggccacatctttgagtgtccggaaagagtccgccatgaactgctccacgacatacggcttttcggcaatggcggaacaggcatcgtccgccctgcctgattccggaacggtctgaatatcctcctcttcaaggaagatttcacggtgcaggtagtccaagtagtaatatgatttcattccgcttattctttgggggtgaaagtgattctcgtgtgcccgtcataaccgaaggacggtttcaggccgaaggcttcggcatcactgctgatgcagcagatgtcccaaatctccaaccctccggcgcaggttatgacggtattgttttcagatatttgcggcgacttgtctttcaatgcagccccgccgcagatgccgcgtagaataacaccacgctggtgggtagtaagttctttcgtttccatagacctaatcttttgcttttacaccgaacatgttctccattgtactggcgagggcttccttgaaaccgtcgcttacgccccagtattcaagtaacccgttgccgatgacctgcatctgtttgtcggtgggcatatcgccatcatacccgtattccttgagcagggcacggctgatgatgacaccttttatctcgttgattctatgttcctctcccatagccgttaatacatctttacccgcagaccagatatctgctttctcgttatttctgtcattttctttatccgtttataaaagcataggggcattccgcccccatagttgttttcctgttacaatccaaataaaattggatcaaagttttcggttaaatttgtttttatcttatttacagcgtattgcatttcttggtgaacttctcggccaaaggtcaaggcacgagagcctccgccggcctttgatcgagccggtgcggaggcacatcgtgcttaacacctttggctctctcgaaagccgagatttcagaacccgaaaaaatccttcgataaacagattttccttagcggtcagctctctgccgcatatcccttattagtttacaaaggccagaggagcagattattttaagcggacgttaacgccgcaacaactatgtagtattctctctgggaaaatccgtttaccggaagggtttctctatgacacgatactattgacatattcggtctgatgtttcagcacaaagaatagacggtttaccagtttgcgggcgacctttacgatagctttgctcttgggcatccgtttgcattgttccgtatagaacaggttcatcgcagggtcttgacgtaccgccacccatgccgcttctatcaggttacagcgcataacggcgtgttttcgtatggtaatatcccccgtcccatctttctctccgctggagtggcacatcgggatcattccgatataggcagccagttgttcggcattgcggaagcgggttatgtcgcatatctcggagaggaacgccattcccgtagcctgcccgaaccccggaacgctcataatcaaccgcagcggttcgcggaatcgatccgtcttggccaatgtccgtaaagcccgtgtcatctccagtttctgacggcgtaactcttccagatgccggatatgaatgtcgagggcctgacggccgctcggggtgagcgtctctatctccttcaaccaggcgaaaaagcgcttcgaccagttggaaaacggagtgagaaactcctgcggaatctcgatgcctaaataccgaagttgagacttgagccgattcttctgacgggtcgtgtctttggttatcgagttcttcaatcttatcaaggaacgcatctccaacgatacgctgtccggcgtataaatgcctttcagctcgttggctcttaaactccgcgccagcttaccgctgtccacggtgtcggtcttacgcagcttttcgctgctcttggtcggcacgtcggccggattgaccacgatgttgtcgatccctaaggccgtcagacgctcgtgtatccaaaatccgcagaagcccgcttcgtacaccgagtgatactcggcgcccggataactccgagttaaaaatccgtacaacgcttctgggctcggatgctggctaaacttcttcaatacggaggtttcggacaagaccgtaaccgaccaactcttcaaatggacgtcgattcctacataaatcttttgtcctctgaaactaattttgtttctttgctctctcatggctatcgtcgttttagttagtaaaggttttgcagctttaatctaaccaaaatctcgatagctttttcatttatccgctatcatcgcggcttaccctgattgtaaacatagggattattaattcatattattttgcatgattttttccggaacacctatccggcatagatgtacttgagcttgggcactccgttctggagcacggtgaaggcgttttcttccacctgcacgtcctttgcctttggccaccatagccacgagagtttcccgtcgggtttgaggaatgccacggcattaccctgcactttcccgacctcacgcacgccgaggtcttttccgccctcgaacagccggacacaccgccacttcgagccaagcgtcattttccgtttcacgtctgctaatgttttcatactcattgcgtttttattattgcatataaattctgcatttccggttgcaccgtctcaggctgtccgccgagagcggataactgcggttcaaatggtcgggaaacccttctcggaacatcagctccgccgtagcgtactccttgcaccatttccgccgacgtctcccacgggcaggtctcgtttccggcatccgccttttcggagatttcggcacacgccatttcccaccgacaaacaccgcttcatattcccgttgtaacacgccgctgcaatacgccgccacgctgacagcgggcacacttccgagctgtcccgtcgcggcaaggctgtcaagcgtatcggtggcagccttgaaactggcaaagcacccgtaactgcgggtgcgctttgcgtcaaacacttctatcatatttattcgttttattattggcacatccgttctccgcttccccgcataggataacagcggaagcacggcaggcggttccgcagaacgccagaccgtgcttaaccgtgttatatacaaggtaggcacaacgcctcacggcgcaaggaagtcatatcggagggaattttagaaaagtgcgggcatttcagggtgcaatcctgacacagtgtatatcaatgcccgaaaaagcgcgcacgccccgcagtttccgcagcacgtatgcgcgtcatgttactcgccatcgtccccgctgtcaattccggcggtgatgttgcatatctcctgcaatgccgattctatctgcacaaggtcgtcgatgtcgaacttcacggcatcgcagtccttctcccacacttggcgggctatgaagacggcatcatgcagcgaccgctcggactcttccagagcggtcttcaggtcgtccacggtgtactccccgtcctgcggcggaggtacagtcccggcaccgttttttgccgggaaattcttttcgcctatcacgttacagttgctttcgcccgaaatgaaaagcgcgtattcttggcatacgccacaagaacacgcacttacgacggcagatacgaaaagggcaggcagtcccacacgttcagcgggctgcctgccgtccttttgcctttttcgggcaggtttcagttactccgttgcccttatgccgcctttttgctttcatcggcaaccgttccggcaggctgttccgccaccttttcagccttgccggtcttggtcgttttctcggcaggcttttcgaggttggcgaggttcggggcgaaattcatggcgttgcggatagcctttgcagcggcatggattgtcttttggaaatcacggtttgacttctcgaggtctactttggtcggcacaagaccgatacgcgcccaaacgctgtcggtaaggtcgtacttcttgatacgatttcccgacttctcgcagatgatgatttccgcaggggttgtggcacggaatttcgagcgtatgccgtcggcatcggcacgcagtttcttttcctccgcaatggtgtgccacatagttgcgaccatgtttttaatcacacggaaaatctcgttgtccgacttgtcggcaggctcaaagtccgcaccgaaaaagtgctgtgccgtctgcacgagttcaccgtccttgttggtagagttgtaaaccaacatgatacctgcaaacgaaccgatgtttgcatactgttccttgttcaatttagaagttgccataatgataaaattttagaaacactgcgcaaaatcacgcattgcgggcactcggggagtcgaaccccgaactctgcaccatagcgcaaagtgtggcatttcctgccacgcgcccaaaaatttgccgtgcatttcaccctgcacggcaaaatttttcgtaactttgtcgcacttaaaacgtaccccatagcaggctatccaaatgagcgcattttcggcatatcgtgtatcggcttactcacgcatcactcgtgtcgtggctctgcgctgctttactccaatttcggcaagacgcttctctggcacgtcccggatctttcccaatccggcagctaactgtaaggtgaggcatttaggcgttaccaccgagctgggtattgggtatagcattggcatatacatttaccagcgtcctctatgcggatagtttttaccgctatcgtgcattttattccgagcgcacaagggcgcaattatggcattattcttacacgtcctttttccatacaactctcgcactcccaaatttgcgtgctttgcgtatgcggactaaaaacacgtttttagccgttccaacttgctacattggtctgtagtcctgctcggtgtggttatttaacaccctatttaatcgctccaaagcgaacaggcgaatttttgattttccaagcctcaaaaataggtttcccacaaaaagggctttttgtttctcgctctcggcggtctttgcttttctgttttttaattctgttttttactatctatttttttattcgtttttctccgtacttgtttgccgtttgtttggctttcgagtacatgactattataaaaccgtttttcagaactgcaaaactttttgagaaaaaaaatttggaacgttccaaaaacagcctttttgcgaatatggaacgcacgcgcgcgaagtgaatttgtaaatagttgaatatcaataaaatagaaaaaatgattttctttgaaaaaaatttttcctttgcaaaaatcaaaaaagccccgtttcaacgtatgtataaaatcaaaatcagttttgtctattgattatcagattattagctgcttaaaatggataaaataggactgaaaagatttttttactttcaatttgtaagcaaagataatgtaaaagacgtttttaggcttactttatacaaaagtaaacctaataaattattgatattcaatggtgtaataaaaataaaaagattggggagggtgtaccctcgggtgcggattcggtctctgtcctcgggccgttttttcaagtccggttttccaaaacggctcaaaatgcggctttcggattgaaactgtaagcaggtatcaaaaaatatacagtaaagtacttgtatttatcatggttgcttaaggtgctggtgttcaccatgtcccatatttttgaaatattctcatttgtggatgcctgtcctttcaattttcacgggtgtacagactttctgcacgatttccgggttccggcttgaagctgttttttagatacgctgaaaacgtatcaaaaaatatatagagacacgtcggtatattgactgttcttaaccggattggacgacggaaaaggaggatgtgtattcctgtcattcagtatgttcggatatgcttttcacaatcggacaatcttgtaatgttttgttccttaatcatatagaatatacagaacgaagctatccacatggattccgacttatttgtacggtttttgtgactttatacaggaaaccgtggaaatgcagaagaaatggggttcagttacctgcctttttggtgaattatacgtatatttgccgtattgtatccacttatgtatgaagtatggcattttgctgttacaggaaatatctggataaagaatcgaaagaatggaatcatatcataagaagaaaatcgggagtattccgaaagacagcacgggtgggtcgtccattcgcaagggaatggtcgtcttcaacggtgggacatcggaaaccggacttgtgggagatgtcacgggtaattgcgtgtcggttccggtaaggatgactgcgggcaaagaactcgttaccgatgacgcggtcatgtttctgaatgattgccgggaagcgagcgcagagcaaaagattgccctccaacgcctgctgaacgaaggccatcttgcatgggacaagcgccggggtgtatgttcggaatctctctatgctcccaaagacggacagttggtaaaactcagtatcctggatgagcatgtaatactgggggctttcaaggaaatcgacgcaaaaggacgtgttgtgctgtattgcctgctggacgaagacgggagcctgcgctattccctgcatgaaacagtcgggtacgcggtgaatctccagatactgcctatcggaaccagtggccgtagcaggctttccgatgctctacgccagaaagggcttgcatggaacggacggctgaaggaactcgaacggctggcaacacgtgtcagacgcggtgacaagtactattacctgaatgacatactggaaatccgtgaatgcagggacaacaacaggccggcggacaggaaacggttggaatgcgggaactatttcatggagcggagggatgccgaactggtacgtgactgcgtgcgctctgtcgtaaggctgaaccgcgacaaggatgccagacggtaagagggtgacggtataaggtattcgttctgtttctctctcttgtatctggggaggaagtggtcctttaatcctcatcttatccgttttcaacactttccgattcaaaaaaacaaaaaaacagacggcgtgccgtctgtcatgatttgtttcttttttggtatcttttttctttgcgtcaaagaaaaaagtacatctttcttctttcttcttgtataatactacttatagtattgttgctacatttgtaacacccctcctgtcagatacacggtacatttgtaccacattgaggggaaagatgtggcgaatttcgcgtctttccacccaaattccactatcgggagcatgaatcgcaagccgatgttgccgcttcggaaaattgcagtcgccttttgcagggcagcattgcaagaacgaaaacggtctgattttcacgtgcaggaaaataaccgcaaaaagagatccgataaaacatctatatatgaaaaatatcccctatatttgcataaaatttacatataactgcgatataatatgattattcagttcacagtcgaaaatttcctttcgttcaaggagccggcgaccttgtctttggctgcttccgcgctgaaagaaaaacagacccggtccgatgagattgtttttgagcttgaaggtacgaacctctctttgctgaagagtgcggtcatctacggggccaatgccagcgggaaatcgaatctagtcaaagcgctcgatttcttcaaatggtttgtcatcaattcctccaaaggcgtgcagtccggcgaaagcatacgggtggaaagtttccgtctcaaccggaggacggaacaggagcccagttattttgaggcggtctttgccgacgaaacggtccaataccgctatgggtttgaagtcgatgaaaaacgtgtacaccgggagtggctttatcaaaagggcaacaagcgcaaggcaaaggaggtggaactgttcctgcgtgacggcgatgagtatgaactgcatcccaaattttcggtcggcaaagaggttgtcgccaaaaaaatggtgcgcgacaatgcgctgcttctttccgtggcagcacagttcaacgaaagcgtctcggtggaaatcatgggatggttggccaacaccacgattgttcttggcagcagcgacgagcggatttgggaaatggcgatagcccagatcgatgatccgtccatgaaaaggcgtattgtggagtttgcccggtttgcagacttcggaatcgacgacatacgcaaggttgacaatacagtcatcagttcacaccagcaatatgacgaggagggcaacgccacgaagacggtcactttcccgttccgcgtaaacgagtcggagggtacgatcaaatacttctcgctggcttatcctataatcgacgcgttggatcatggcaaaaggctggttgtcgacgagttcgactcgaaaatgcaccctctgttgaccagtcgcatcatcgggctgttcaattccagagtgacaaatcccaggaatgcacagttgattttcacgacacatgacaccaacctgcttaatgcaagcctgttccgcagggatcagatctggtttacacagaaagattcgtttggagcctcggaactctattcgttggcggaatacaaggttcgcaacagtgcacctttcgaaaaggagtacctgatggggaaatatggcggtatccctgtcatcggccagtttgaacggttatttgacctgagggaggaagaatatggcagcacggacgaacaagcgtgatccacgcgcggcacggacactcaggcgtatcagttttgtccgtgaggtcaaacaatccttcctgatcatctgcgagggggtaaatacggaaccggattatttcaatgcgtttcgcctgacctccgccaatattaaagcggtaggccagggactcaatacggtaggtcttgtccaaaaggctttacggatgaaagaagaagagcggaagaaaggacgcgagtatgaccagtgctgggtggtatttgacaaggatgactttcccgatcgggatttcaaccgggctatcggtatggcggaagccggtggcatgagggtggcatacagcaaccaggctttcgagtattggttcttgctgcactataacctggtacaaggcccgatgcacagaaatcaatatgaaacaaagctatccggcttgttgggcttctcctacaacaaggaagccggtacaggcggtcgtgttttcagggagctgggcggtaaacaggctcaggccatcacgaacgcaaaagccgtattgcgccgaatggagggaataccgccggcacaagcggaatcttcgacaacggtgcatcttcttgtggaagaactgaataagtatatttagcatattctgtcgtttgcccggataatattgtacccggctaccacctccttccggttttatcggattttatgtcgcaaaaacacaaaaacagacggcaaatcacaacgatgccgtctgtttttattcatttacgttccgtggacagatacgctcaaacttttcggtgtctctctttccattggctgacctcttcgtcagagacggatgccacggtccttttttccacatcgaacatccgatgacagaatgccctggtagaaaaaggatttccaagttccgccaatatccctacaagccggttgtaggaatccatgtgccacaggtaatcgtacatcccgctgaccggcacccgttcaagcaatcccatacgcgttgtcttttccacgcacttgtcgaaaatccgcgaacccatctccatgttctccatgtagtaccgcttgctgcgcaaggtgtcgtaacctttttcacgcaggcgtgtacggtctgccatgtacagcatgaagatgacctcttccggggtgaacgcgccgaccagcccggtgaagcatttcataaacggtatcacgtgttgccttttgtcgtcattccctttcatgtccgttttcgcgttcgttcgtccgtaatgtttccgcttccccgtcatccttaatcgacggattgacatagaactggcatatcctgccgtttatcatcggtttatacacggcgtatcccagttttttggcgtaacgccccacggatacgcggttggcgaacttgccggtatgttccgtcaggtgttccgacatctccccgacggtcattctgcttttcagtttcatatcattcgcgtttaaatgttttcctgataaaggatagccgcgactaatacgaactgtttgcaaatggtatgaattaataagaggcggttccatgaaatcggcaaaggaggaatcaaccggttatactgatacttcattcatgaaaccgtccctcatctattttcccattatccggacaatctcccgtatcgtgtcgaagttccgctcgtccagccattctttggccacgttccacgagagcgacattccgaacttcaggttctccatggtgatggtatggtgcgacaacctgccttcagtgggcttgagccctgccgcgtgcagttcacacagtccgtcctgaaagaacgtgcacccgcctgcttcctgtttcgcctgtaccatcggcacgatatacgggatttttcccaacagcaggcctaccgcccaccgagtgggtgcaagacgctccctgtatccggctttcagcaaccggaggatgtcttccggcgtaccgaggcacggtatccggcattgctgcctgcacagacggcaacggcactctaccggccgtcttcctgtcttgcggatgatccgctgtaatgccgtttccatcgctatgcacccggtgggcagtattcagggttcctcttgcgccacagttctatgatacactcccgtccggcctgtgtccatcgtttggtggatccgaaagtatataccttgccccggctgttctcccacgtgtaaggcacatcgcattgccaggcccggcaggaaggaaagaccacccattgccgcttctcgtacttgcagatgccctcttcggcaaggaactggtgcaactgtcgcggcgatatgccgagttcgtcagcgatgcgcgtgctcttgaaccagtccctgttctcgataaactcctcgtagaatacgattttcggcagggattcactcaccaccttccgcagttccagaatcagtctcgtcgccgattccatatcctgcggcatgggacaatccatacagggcagaccgggtgccgccaccctggggcgttcgcgtacgattgtcttccctcgtttcacggagagtttgccgatagcctcgcccaaccattccgccaaagacaggtcaggggcgatccatctggccaacggtatgacaagcggtgattccaaccaggtcgcaccgtgcccccgcccccgtgtggtgaagacttgcgactcgtatttcccggtatgtccgttgccggccatttccctgcggagcatatccgtggaagcgatgcgtagccattcagacgggattttcccgaagtgcatcgtgatctgcgtggcgttgaccatcagcttgtcgccgacacgccggaacgtgacggggaacccttcctcgaagtgcatgacgatgtcgtcctgcgggacggcgtgcagctccccggcttccagttccagaagcttgttgccccacacttccaattcatcaagcaggtcacggggtataatagtctccttgcgtaccagttgtaaaagccgacgcatatcgatgggacggaaaccccactgttccctgccgtttttccggaaactgattttcaatgccgtcgggcaaacacgggcgatggcgccgttttcaagcagttcgtcccgcttgagtatatcgcatatatccacggcgcagatatggagctggccgttatggttccgggaaacccttatgttccagtcccggaacggaacattcctattttccctcataggtatttcctcctttcttttggttatcagacttacgtttgttttcaagcaaggctctcttatgtgccatcttgcgcaccggatagtacgtgcgtttctcgccgcaaagggcgtcataatctttcagcatcagtgtgccgaggtcggccagctcgatttccacatccggatgcagatgcctgaaatagagtccgccgctgcatacatacttgcccgtgcaacagaatgagatagcctgcaagttgccttttgtcaattccgccgcgctgtgcagcgagcgcgtgaccgctacaagaacctgtgccccgttgaagatgagcaccatcttgggtcgtttaaatgtgctgcgtctcatgttgttctaaaatttgcgttaattcctcctttgtaaatctaagaccggcagcctgtaccagccaagtgtctgaaaccgtaaatccaccggacagcagttcgtccacgcgctccagaaggtagacaccgaacgcgggatcgatgtaaacgacaaataatagagccagacattcatcaattaacaggtgtcccgacgcctcgtcacggatgatcatcttttccctgtctattccgtaggcgtctgccaacgccgttgcccagtgatggaaagcgacacggaaatcacggacattatgccggcgtgcatctcctttggcctggatgaagcgtgtcgcgtcgaaatagaccggtccgtcttcccgtaacgttccgaaaagcagatcggggaactccctgtaccggattatccggcagggaatcttttcttctttcatgttctctttttcattgttcttggatttgtatctaacgtggtgcaaagatatatctttttaatatgaaatacactataaatatatacataaattacacttttaataaattgttaattactgataataagatatttacaacgcaaataaaaccgaaatatctatatatttaagttgcatatttcggtttgtaaatcaagcattaagagtcccgttctccatatattcttttagccgtaaaaacctctcttgaggattgtctctactctttgaacaagaaacaaaaaaattatggctacatcggacaaatcatttaacggggaactcttggagagtatttttaagacctccaaaaagacaattcaggagtatgttcgcgaaatcgagcgcaacaaccgctaccgttcatgtcgtcaggataccggttcgggatatattctcgatgaccgcgcccggctcattgacctgtatgaagcctgcctgcaacaggacgctcatatacgttccgttgtcgagacactggaaagccagattctcggcgaccgctatatgcttgcccgtgtaaacgaaaagggaaaatacatcaaggacgtggcgaactccctgaagatacagggttcgcagttcgacaagataatcaagggcatagtggaatccaaactctacgggtacaccctgcttgaaatcatgccgcatactgaccccagaacgggcaggctggcggaagtcaacatcatcgaacggcgtaatgtgttaccggaccagaaaacggtactgaagcggcagggactgtgggagccgcattgggatttacatgacccggcatattaccgttgttatgtactggtaaactccggcgacttgggacttttttccgccacgacccctttgatactggccaagaaattcacggtggccaactatgtgaacttttcccatacttacggacagccgattatccacggaaagacggtcagcgagagcaacgccgaccgcaagaggctggctaacgagatagccaacgcggcacagaacaaggtggtggttaccggcattgaggacgaggtcgatatcaagacattcaccatgtccaactcggaaaagatatataccgggcttatcgagtttgtgaacaaggaagttgccaacctcgtgctcggctccgagtcgatggccggagggatgcagtcgtacgtgggttccacgaaagcacaccaggacattttccgcgaccgtatcgaagtctaccgtcggtatatcgaaaacatcatgaacgaggagataatcccccgcctggtggctatcgggtatatccccggaggattggagttccggtattcgaaccggatagagatgagcaacgaggaccgcatcaagctctattcgctgatcacggacaaatatgaagtggcggccgatgagatcgagaaagagttcggtatcaatgtgggccggcagctcaatgttatcccgggattaggtttcggagccgaaggcggctcatccggtctcagccacaacgaccggggcatcatgtcggacgaggagtatttccggcgttacggacgcccccggggggcgaaggtcggaaattttctgcggggagcggaatagaagcccgtcttccgctcccggacaacgctccgttcagagctgtcagggcatctgcaaccacggaatccgatacggaaaaggagtatcgtgtcattttcgatgcattccgcaggctgatcctctattgggagaacagcgcggaacgtctcgacattatagaggacatcatcaccctgcgtgcctctttcctcatagaccgtgcgctgacaggtctgcgaatcgacatggaccgggcattggagatactgaaaaatcacaactcctttacaacagagagggaacggcagcagcgtgacatcctgattgcagccatagacaacctggtggattttgccgcggcagaggagtattccatgctcggggaactgcccgagacagcggatgaacaggacatggaagcacacgaaaagatatgccgcaggtataacctcgtccatgcggaggaagagaacaaccaggtattcttcgcggcctcgatggccgcatggtggatggcggtggatatggataccgtgcttacctacatgacacaaggcgatgaacgggtacgtgcctggcatctttcattggaagggatttccttccgcaaatccgagtttcctccggaactgataccgccgatcgaatggggatgccgctgctttctggtcgcggaggggttcgccgctgtccgggcggctttgccggataagggagactatctggaaaaggtggatccggtcttccgggagagcctggcaaccggcgggcgtatcttttccgatgcgcaccgctatttctccgtcccgcttccgggttacatgaatgatattgtgaaacgcattaaaggaaagttcgcctatgcccaagataacgcttgatgagttttgcagccactgggtaagcaggaccagtacgcgcgtcatggccagccggctagagttcaacgtattcgacttcgcaactgctgccggtgactataccaggcagcagttcctgtcctcattcgcttcggggggattcaacggtagcaaatgggcgcctcgtacctccaaatggggaaagaggttcacccatcctctcatgaacgatacggggactctggcccggagcatacagtcggaagccggccggacagacatagtgggacggcgttcggaccgtacgcgcatcttccggaaaggcgccaggtattgcatgtggactacggaaaagagctttccagtcaagggcaagcggggacgcagcaaggagcgttacgggcattatgccgccatacacaataccgatccgaagttcgggctgtacacggtaaaccagtattccacgcgccgtcccgtacaccggcagttcatcggattctcaccgaaaacggacgactatatcgccgtccatttcatagatatgatttttaaaggatttccacaccagccgctatgataaaagacaaacaccccgcaccacagcccgcacaaccgtcggcaccggcggagagcctgcctgaagaagtttccgcgaaccctttcgtggagatataccgggccgttaagcgggctgtcctgaccctgcgggagaatccggacgacccgttgtcgccgcccctgttcaaaaccgtcgctatcgacaacggccagttcgcccgcattgttcgtgacgataacacggagtatgagactgtgttccctgccgtgttcatccactttatcaacgtgaggtacctggtacagcaacagcgtatcggtgagggacgcgccaccatgcgcgtgcggtttatcctgaatacgctcaacaatgcggacgaagacaaggaatgcgaggcgtttctggtcttccagcggctcaatgtagccatacaggatgccaagaaccatgagccggcgctgagcgagcggtgcaacctgacctatttcgacatgccgctttcaaccaatatgttgcaggcgtactggatagactacgaggtatggttcagggaatcttccgcgtggaaatacagggactgggtaaaaaggtatgtggtcatgcccccgttcacccaacacagcgatgcgccgcaacatgacagcggcggacacggcttccatccgcgtccggaacatgacgaagtatctggtttttcggataccggatcgaaaaattgaaatccatgcaggagatttatccgcactgcgtataaacagacatgaatcagcagataatacaagactcatgatacattttctgtacttgctgaatttagaatgttcagcatgccggtcttgatacaaatagttgcaaccggtctgtaatttgaacaatctattatactgtaaagataatcgcatttccataaatggatggattctcatatttccacttccataaatagcagtgcaaaaccttttcttttcccaccgcctactcttgttcaaataacccttgcatatggatatgaacacacttcaatatgtcgtcggagaggcgaaggcaggccagccggctgttatccgtttcttcggtcgcgtgacggaagagacgacctcacgtttcaatgacgagttcgactttttggaaaatatcatccgtccctcctgtatccgtgtgttgatcaactcggagggcggcagtgtcctttacggcatgtccacctattccaccatcgccaatgccacggtggatacggaatgtatcatcgaaggggtcgcggcatcgatggcctccatcatctgggcggcgggcaagcgttctctcatgcgtgattatgccatactgatgattcataacccgatgttgccggacgatgacggaggggaaccgtcggacatggtaacggcttttaccaaacagatcgagacgatttaccggaaacggttcggcctgaaagcggagcatgtgcgggccatcatggacggacaggcaggaaaggacgggacctatttcgacgcacaggctgccgtcaaggccggcatcatacctgcggagcatgtcatccatacctcgaagcagctttgccgtaaagtgcatgacgagatagaaggattgaccgatacggccgccatccaggaactgatgagccgtgtcagcgcgggaaataaacctttcaaaggcattgaacctactcttacagaaacggaaaacgatatggcaaacgaaaacaagacacaaggctttgagtacggggcgattgcagcctcgctgggcatgaaggacggtgaggtcaaggacgtgatggcacgtatctctgaactggccgcgatggaacccaaatacagagaaatacagaaatcactgagcgacgcgcagaccgtcatcgccggaaaagacgcctccatccggaacttgcagacagacctggccgcagcgacggcacgcctttccgcctacgagcagaaagagaaggacgagcaggcttcccgtatcgagacattggtggagaatgccattgcagaaggcaagattgaccgtgaggcgaaaacgcagtgggtggagatggccggttccaacttcgagttggcggaaagcacgctggcttccattcccgcgcgggagaaaatctcgaaggaaatcgccgatgaccctgccaacatccaggccacggcggaagcgacaaagaccgccgaacagctgatggccgagaaggtggcggaagtggtcggtgcggatttcaagttccgaaagctctgacagactatccgcgggcgtccgcccgattttaactgacatgccggagaccgcagtgtctcgcgcggaaacagcaggtatccgccagtcggccgagtttcattcttcaacggaaaacttaaaacgacaatggctgatacagtaaactttcttcaaaacgggtatagcggcgaagtacttgaggacttgctgacctataccgtgcagggcaatgatacagtccgcgagggactgattcatatcaagacgggcatccagcaccgctatacgcttcctgccatcaagctgggcaacattatccaggacaacgtgccgaccccacaacccatccacggagccaagggcgatgacggcacgaacgagtaccagttcaccgaacgccatcttgagccgtccgattttatggtctatctcgagtttaacccgagggactacgagaagtactggcgtttcgcgcagccggaaggcaatctcgtgttccgcgagctcgacccgaaaatccaggcgacgatgctccgtctccttatggacaagaaaaacgagtatatcggaaacgccatctggacttccgcccgcggaggagagacggtggccaagattaccgcaccggaaggctgcacgaaaatcggagccaacaaggagaaatattttgacggggtcatcaaacggatcctcgacaatgtgaactcctccgatgccgaggtggttgccggagggcagtgcatcatttcgggaacgaccgagctgacggacggggccgcggtggaggcggcgctctatgcgatgtggaggaaatgtccgaagcagatccgaaagaagacatctctgacctttgtggtcggatgggacgcctgggacgcgtatgaccaatatatctcggacaagcaggtcaagtattccgagaataccgaggtcaaccgctatcgcttcaagggcaagcgcatcgtcccggtcgtgggaatccccgaacacacgatggtgctcggcgagttctccaccggcatggactccaacctgtggatgggggtggattacgcgaacgacacggacatcctgaaaatcgaccgtctgcaggccaactccgagctgttctttttccagatgcgcatgaaaatggacgtgaacatcgtccgcccggcggagatcgtggtccataccgcctacaagaagagcgaataacacacctttcttcattctcaatatccacccggggagcggaggcaaggccccgttccccattttcattctactgttatggcaaagaaaatcaacacggaggaaactccgcagacagacaacaataatattcctgcaccggaggctcaggcggtgcccgttccggaaacggcatcggaaaacctcgggacaggcggcgagactgaagacaggctgccggccaagaccgcggggaaagggaatgcagggtcggaggagacgacagagcctcacatcctgtccctgttgaaaaagttcccggcatatccgtcgctgtacatcgacacgcacggaggaacctatgcgccggacacggcggccgccatcaggggcaaggccgtactctacaggaatcctttctacaacgaacttaaaaagaaatcataatggcactcggtaatgtatttatcaaggatgtggacggcaatattccttacgataccggctcgtcgggcgagaaggtgacgggactgctgttcgacgtgtccctccagccgacgcttttcacggaggggtatggtaaaaccaatgagaccaggctcaagcctggcgatgtctgctacatcacctcgttcaagtccgccgtgaacgacttcggtatcatcgaacgtgtggaggcaaccgacgaggaggagatgaatgtcaatttcctgcacggcatcccggcataccatatccgtgaatttttccgcatgtccggcaatccgggcggttcaggaaaactctacgtgatgttcgcggactgttcggcgaactgggatgcgctggaaatcatgcagcgtgctgccgggggtatgatcaaccagataggcatatggacggaacagccgctgtggaaagcgaacggcgcatcggaacaatacaacctcaatctggtaaaggggctcaacgacgtggccgtggggcttgcggagcagaaccagccgctctcgctcatcctttccgccaatccttccaatacgggggcggatacgactgaggggcgtcagattgacctgaataaaataccttcatgcatctgtgaatcaagccgtatcagctgtatattcggccaggcgcatcacgaaaagatctccacgatgcagatgtgcaacaggaaccatacgcccgtgggatttttgggagcggttatgggagccatagcaaaggccaacgtgcacgaatccatcgcatgggtcaagcagttcaatctcttcgcggacgatttccaggaaatagagttggggttcggggacatcaacctcgacgaggcagaggagaacttcctcagcctgaaccggtacgagtcactctccccgtcactgctggacgaactcgacgataaggggtatatttttcccatcaagtatgccggccgcgagaacgggatctacatctcgaaagaccagacatgctcacatggggatttccgtaccattgcccggaaccgcaccatcaacaagagccgccgtgccgtgcgtgcagccctgctgccgtatgtgaactcaccgctgatggtcaatccttcaaccgggttcctcgccccgtcgaagattacagctttcaagacactcatcggggatatactggccaagatgcaggcggcgcaggaaatttcaggatacgccgtcactatcgacccgaaccagaacgtgttggtggacgacacgctgcgcatctcctatgtccttgtcccggtgggcgtggccgtgaagatttatgtagaggaaggactgtcattaaccgcaaataagacatagcatatggcaataatcaacaatgtagcatactcgtggtcgatgataaccctgtcatcgaccgccctgggaatcgatgaaggttccacgacccttgaaggcgtgtcggccatcaaatggtcgaagaagcgcaaggtcgaaagtaactacggcatgggaggacggccggtgtcgagggggttcgggaacattacctatacggcgagcatcacgatggactatgccacgcaacagctgttgcgttcggtgtacggctcgctgctcgaaatcggcgagttcgacctgattatcagctttgccaacccgatggccggcgaggactggacaacgacgaccgtaacgctcaaaggttgcatcttcacggaggattgtctcgagtcacagcaggatgataccaatatcacccatgaattcgatctcaacccgttcgatatccaaatcggctcgggtgatacaatctaagctgtcatggatgtaactttcgaggggaaatcttctaccggaaagaacgaatggctcacgcctccctgcctgcttcggaggctggggccgttcgatttggatccgtgttcgcccgtaaaccgcccatgggatacggcgcgacatcactataccattgaggatgacggcctgcaacaaccctggttcggacgtgtgttctgcaatcctccctatgacactgcactgattgtccggtttatccgcaggtgtgtcgaacacaggaatgccgtcgcgctcacttttgcccgcacggacacgcgcctgttccacgaactgatattcccaaacgccgattcaatactctttatcaagggacggctcagtttttaccatgttacgggggaacagggtggtacggccggagcgccgtcatgcctgatcgccttcaacaaagaaaataccgcggttctggaaacatgcggtatcgacgggaagttggtgaagccacgacttcaatagtcaaccataaatttgttacataataacccgtctgtttgccggatattgaccttggctgacagacgggatttatgtatggcagacttaaatcgaaatatgcgcttccttatcgaatgacgtatgctcgttactgaacacatagcccaactggttgcatatgcaccgggtgtttccgatgaccttattgatattgcggtgcgagtggccatatatccagtattcaatcgggctgtctgcaatgaaaccgccaagctccacggtaaatgccccattgagcggactgcccttgaactccggcgccatcagttcgaatgacggtacatgatgagtggcgacaatgagatgtctggcagtactttgttttacgctctgttccagaaaacggaaacagcgcgaatgttcgtcattgaaccttgtccagtccagcggttcgctgccgtaacgcatcctgcggaaatctgtgatggctgcctcagtttcataggcatcctgcaacaggatatgtgaccacagtgtggtagcgatcaattctatatcgttacccaatgggataacggcattatagtggcaggtgatgttttccctgattttgagcgaccagccgttatacagcttgtctatgtcgaacatcttgtaaaactcgtggtttccgggaaccacgatgacccggctgtaatttccggaagcccagtcccagaacggatgtctggagtagttctcatctccgatatatcctatatctccggcaaggacaagcacttctccggcaacagccagcgggttgtgcttcaaaaaactgctgttctcccgaaactcgagatgcaggtcggatgcgtattggattctcattgttgtgttatgaaattggcttcaagttgttccaataactgttctccggaaatgcttttaagtcctgccgatttgaaaaaatcagagtttggcacttcttctttgacagccaggcaaaacctgtcaacatcttgtttaagcgaatcaggaacttcgtaggtgtcggcaggagcaagcatggcaaccagccggaatacatctttcttgtgcttgacgatatgtttgctgtccacttgttctccattgtttttccgctcggtcatttctaaataggccctgcatttcagacagataagactttcaatgttcgcaatatgtacgccctcctccaacgtgctgtgttcaatggtataattataatagtcatcatccatcaaaatggctgacagacttgacaggtcatcatcaaccggaatgggggtaatgtgggcatcgtccgggaatttgacaaccccgatatttcgtgaaaagagttctatctgatacgggaaatccggatttcccggttccttgaacctgtaatattcatgcctgcattccccgttcccggttcccttattcctttgtctgtaccctgcggtttttacaaactcccagaattttgcagcaaaatccgaagacagcgcctccacaatcagtataatgtctatgtccttggttgcccttggagtttgtgcatatatttcttcatgcatttcacaggcagtaccacctatgatgacatagtttccttcatatccggtgaaaaactccctgaatttatcaattcctcttaccatatcatattatttatcatagtttccaattctatttgaatgcgttcatcatccatatccttcatggccagaaataaagacaatttgtctacaatgccgttttttgagaaaaaacatggattgtaacgccatatctctatgcgggtctcgccatattccttgtctgtccggatttgcaaccgtcgagcttcttcttttgcaatggcataagtgtcatttttttccttgttcagcattgaatattccgacaaggcatttactccactaatacaaaatacttcatcaggcagactatcggtatatacaatccgctcgatggggttcgccaggaacggcaacatcctgtcccataattcacgctttttgaactgaaatatcatactctttgtcttgccgccggataaagcgataacttctttatctttcagccatctgaccgcccggtttacattggcatacgacacgttgaaaagatctgcaatatcataagttcctttcccttcgagagactttacttcaagatgataaaggattatgcattgggcaattgcaggaatctgcgtttcttcaccgcccccgatattatttttatgcggtttcaaatctatcaacaaatccggtatgaacatttgcttttgcggtatgatgaaatttacacgatgtctgacaagacgccgtacattataggccgccactgtacgcaatacaaatattaccgggcattgggcttttcgctcaaccagttctttttgtttccgcatctgccccggagtatatgcagaactgtctgcactatacagaagaactacgtcatgccccaacaagttagccgtacaaaatgtataaccggcagtaatattggctgggaatgtatgcaagacatccttttcgaccggcctgatgtccgccctcaaatcaagcaattcagcgatgtaccggcttgtcacatctataaaatcatctattttgcacataatcatttatgtttgagaatatgcaaaattaacgattatatactatatatcaaagaaatatatgaaatatattcagcgaaatttcctttaaagactgatctgggaatatcaggagcaaagaagttttttgtataacatatggattacaagtgaataagaaccgtgtcttcaacctttccacgattctttgtcctactctttcggtgaatcaaaacaaattcgatatggacgaaaaaatgctttcattggaacaggagatcaagatcaaggaaaaagccctcaaactgaaagaggagaagaaactccgcaagatttgtccgatggtcgttttcggagacaccgcaaacggcgagaaagagatttatgtggcctacatgtccgaaccgagctttccgcagttcagcaaattcatggccgcttccaaaaaggacgaggtaatcgccatgcgcacgttggcccgcgactgcttcgtggacggagataaggaactcgtggacgacgagtcgctcttcctgttcggtctgatgggacagctttccgagctgatcaccacccgccagagtgtcctggtaaacttataagccggtgggtagtgaccgacgagcagcgcatccgccagcggatgatctatgtccgccactactttcccggcgtcaacctcgacacgatttccgacgaggagttcgcgatgctttccgaagaggcgttgtggctgcacgagcagatgctcatcagccgtatgcccgttccgatgtcattgccggagaggactccttgacctgccgccgtaagcttccggtttgcggcggccttcgtttcataatctccgcccttgcggaaagactattcttttaacgcagtacccattaccatggctcaggaacagaactatcaggtcaactactccatcaacgtggatgcctctcagggcaccaagcaggttatcgccttcggtgaggcggtaggcaagctggtacaggcgaaagcgtccctgactccggccgtcacgaacatcaagaatatgatggacgagatagaccgcgtgttccgcaccaagaacggcaagaaacgtaatttcgattaccgcctgaccatcgatacgaaaaaaagcgaagagaagctggaacgtatcaaggggttactcacggatatttccacgctttccaaaggcatcagcctgaccatcaatgccggtcaggctttggacagcaagaaaatcaaggccaacgccaaaagcctttacgagaaaaaggctgccgagatgcgcaaagcggagatcgaaaagaatgccgcctcgtccgttggcacgatggcagacgcgcagaaacgcattaccaaagccatcgggaaaatcaactccgccctggtttccatggaacgtgaccgggaactgcaaatcaagaccgggacggcggaaaacaggttgcagcagatactttccctattgggtcgtatcaaaagtgcttctgtcatttctttcaacatgcagggaggcataccatccgaaggactcacaccttccgttccggtgccatatgctccgcaggccttcgtaatgcccgaaaaggcccggcaaaaactgatggaacggctttatgcaggacagcagctgcatcgccagaaactggtccacgcggaggagctctttaccgcagaccagcgccgtaaggcggctctggcagaaaccgccgcggcggaaaagcggcgtgccgatgaagcgcgggctaaagaacgggagtgcaagaatgccgcccgtgctgcggagaaaatacgccggcaggcagaacaggcacgccgtaaggcagaaacggaacgtataaaggccgagcaggctgcaagacggcaggaacagcgcaatgcgatgcagtccgtcaggctcatgcagcgggaacatactgcagccggtacgctctaccgcagtaaacgccgtgccgccatcaaccgtatccagtattcgaaagcgccgtcactcaggaacctcccgttcgcttcgatgctcaatgcctatatgggttacagcctgatccgttcggaactgacgaaggccatcgactattccaacatcatggaatcggcacattccatcctccgtgtggcggacagcgacctcaagacattcgagacccgttttgacagtatggcccgtcatgtccgtaaaatcggcatcgacacgaaatacacagccgtggagattgccggtgccgtcaaatacctgtcgatggcgggcatgaatatcgagacaatcaacaagtccatccgcccgatcacgaacctggcacttatcggtgacaacgacgtgtcgtatatcgccgacctggccacgaacatcatggccggttatgatatccataacgacagcatggacagcgtggcggacattatctcctccaccatttcccgctcgaatgtgaatatcgtggagatggcggagtcatacaagatggctgccggttacctgcgtatggcgggcgtggacttcacggaaagcagtgccgccatcggtcttttgggcaatatgggtctgaagggaacgctggcgggaacctcgttgcgtgctctttccacacgttttgccaaacctaccaaggaggcacaggaagttctggaccgcctgggcatccggttcacggaaatgcgcgacatcgagggggtgcaggtcgagaaactccgtcctatagcggacattttcgaggaattgaacaagaagggcgcgtcgatggcggatgtccaggcaatcttcgggaaaattggcggtaacgcggcgatgatgttcctgaagaactacgacaaactacgagaactgacttcatataaccgggggtcccagggcgtttcctcagaactggcattggtaaagcagaatacgaccaagggattgtgggcgcaggtgacctcccagctgaccgaagggttcatgcaggcatacgaggtgttggaaccctctatccgcactgtgctccgcacttttctggcaaagttcaaggctccggaatttacccgtggcctggtgtccatcgggaatgccttgttggacatcttcaccgtgatcggcaatatcggcgcatgggtgacccgcaatttccattggatagaaccgcttgtctttacaggcgttgtcgcgacccggctgttcaaggtggcgggagccctgacgaatatcggcatcgccatggggtttatcggcaaacagtctgcggccacgacatcaatcagtgccgtgcaggggctgctgggggcgggtggtatcggtaaggtttcgtttgcccagaagcgggccatcgtgtcggccatgcagtccgcaggcgtggcgggacggggagcgatgaaccgcgccttgatggccgggggcggtgtcatcggagccaaaggagtcctgcagtcgctgtttgccacacaggtggctaccggcagcggactgaccggtgctgccgcctcgttgagtgccatcagtacaggcgcggttgccgccacggcaggtatagccgcattggtcgggactttgggatgggtggcttacaagacctggaagataaaggaggcgaaggatgccgtactggaagagatcgaatcgaaccgcaagtaccgttatccgtccatagaggcactttactcctccctgagcgagacctataacatggctgtcaagacaaagcgtgccgtggacgaggtcgttgccggcaaaagtatcgaagaggcttcgggacataaaatcggagccttcacatccaactggtgggccgggttcttgggggaatttgccatcgcttcatctgaggggatggtatcgcgagaccatgtgtataacatggacaaagcccgtcaggatgacataagggatgcgcttgtcacccttgccaaacgcgacagccagacacgtatcgatgccgcgtacgccgagttcgggaagatgggtacggtattggaagtggacgctttcctcaagacggtaaaggagcgtttcgggcaacaggagaaggatctcgacaagtctttgtggcgtatgcaggatggcaaggccgtctatgtgaatgatatcggggacaggtcggaagcggttgccgcccgcacatacgactatgcccggtacatgaacacgcagaccgttccggagattgtgcgtgccgccaccgcttatcggaatgccatatcgagtgccgccaatgcgcatgagctgatgcgtaagggagggttcgactttgaccagttcagggcctggggattcgagcaggacgaaaacgggctatggaaacagcgggcactggggcagaacgccaccgatgcgcagcgtatagacaacatcgcgcatcgcaagctggcacatacgacactcgtgaagttcttttcatcgctccggcagactttcggaggttcggcggaggcagccgagaacatcctccgcgtggcgggcttcactcccgaccagtacggcaacgaaccggattccaacgatacacgtccgtttgctgccaacccgattaccaacacgcatctggatgacggaggggccggcggcaactattccggcacggggcggttgtcctcggcggcacctaaacaggtcatcgtgaacatagagagcctgctcagtgtcaggaccatcgacctgatgaagtcgaaggaggggcagacggaagagatacagaacctgaaagaacaactggcacaggcgctcatcgatgtcgtgcatgacttcgatgcctcctggaacgcataaaatgaaaggattatgggaagactgatacaaatcgcggcctcgactttgttgagcggaggcatactcaaccacggttcgcttggcggatacatcagcaacgccacgcgtctggcgttgggcatggggcttgccgaattgcaggacgggcaggtacattacttctccaggcaccatgacctgctcaaacgggcagccatacaggttgcctcgcagacggcttacgggttgctacgttcctatccccgatacctcaaatactgggaacagcaggtgcgggacaaatatcttcagacacagtcgcagtccagccttgcgaacaagaccggacagtactaccagctcatcagggaacagcaggcggtggcgcagaagaaaaaccatatcgattccatcgtcggccggacagtggcggattttctggaactgtccatatcagaggaggggaagtattatgacaacagcgagtgcaaggttttgccgaacagccggtatggactggtgacattcgtggacctgggaccgcaggtacaggtcagcagccggaacaatatcctgctgacccgggtacaggggcgggactatacccgcaaggaatatatatccgggggtgacctcgagattaccatcaacggcaagatcacctccaaatacccggacgtgtatcccgaggcggaagtgtccaagtttatcaggctggtacaatacaagggtgtcatcgattgcgacaacacggtattgcgccagttcaacatttcacggttgattatacagggctataccttacagcctacggattgccggaacgtgcagccgtattcgctgaactgtgtcgccgtggagccatcggaagccgtggaactgaaactggcggaacaggaaaaggtggacacggccatcaagcacacgaacaagtggatcaagtatgttaaattcggtacggaggtcatcgaccccgcctcgttgcttaaactgacacgtttatgggtatagctgcaatggatatcctctgctgtcgcatcaccatcggggatgccgacccatccaatccgatgaggatacagaacggcgtggagattacggaagtccagtcgctcgaaatcaacgagagttacaagaagctgatcggaacggccaaagtgatattcccgaaagggtcggtatgccgctccacgattatcgggaacgtgacattggagggcaaggacgtgtcgaggataacgacggaggtgatgcaggacggtgtcatcatcgagaaacgcagcgcgcagcgtctggttgacgagacgacattcaaggtcggacagcgcatcaatatcaagctgggctacaacggcgtgctgaaaaatatgttcgacggatacattaccggatacaattcggacagcacgctggaaatccagtgtgagaatatggcctacaaactcaaactgaaacaggcacctcatttcgagaccccggcgaaagggacgacggtgaacgaggtgctggaaggcaagtataatatcctgaaagataccggcttcaggatacactcggatacgaagcggtttgagatacatatcggcaaggtaaaggtcacggacaacttcacggtagcggatatcctttccgaatggtcgaagtacaaggtctactgttttttaaaatacgatgccgatgatgacggggccataccgtccattgccgtcgggcgtccttattcgtccagcaaggctcagccggtattcccggaggatgaatcgacaggaccgtacaggatatacttcaacgagcatgtggcgcagagcaacctgaaagtggtcaagaccgatccgaagtttttggcggtgacgggcaaggcactcgggacggatgaaaaattctttgaggtgacagtacgcatgaatcctgaatacgacccggcgacgccgggcagcaaggagtttcagacggtcaatgccacgcagatttcaaaaaagacgcacaaagtaacgggcaacacgacggcatcaggagcgaagaccaggaccaaggtggatttatccacatataccatcgtaccatatatgtcacctcatgtcggaatcaattccgaccggcttgtagaagagacgacggaatactttcggaattacaatctgaacggaatcaccggcaatgtgacagtattcggggatttcggactgtctcctgccgtacaggtggaactgatcgactaccgtaatccttccaagaacggcgtatacctcgtggaagaggtaacgactactttcggggtgggtggatacaggcaacaactgagtattccgtataaaattaggaaataagatttaccgttattcaacaggaggaatttctatcaatggttcttcgtttattaccttgataatattcggaagttcgctattgtatttatcgtcagtagagcaatcaaaaccttttcttccactaatgaaatccggtgtcgaagtttcaaaagaccctttgcgtacaaccggtataaatttagtggttccctgattgttatatatttcatgtgatattatacccccttcataagcggcacctcctttaccggattcagctttctctttatactttggagtcagaatgcacagaactttagttgccttacggatgctttcaagcataaatttaggcaagtcagttccatgaggttgatactggtctatttgagcatcaatccctcgtcttcgcaaatctttggcgaaagtttgaatccaattcataaagacattgtcttctacctcccacgcatacgaaatcaacacaaacggcttgtttttattcacaattggttcttccgccactttattgagaatttcaggcagaggcgtattatcgattgtaggaatgtctacatctgcccaaggattcaaagcttcttgtatcgcatcttttggagtattcattagcagcagcctgtttattttgatagacaaatctttgaggaatttttgtacatcattctcatcaagagctaaaaataaagtcctataccatttaattcttgatgtaaattcttccttttcccgcaattctgccatatattccccatatgtatgaggtaacgacaatgttgttaaatatggcctgattgtattataaaacaatggtccatctacatacagcggcgcataatcattttctttgttcgatccgataatattccaaagctgttcatatatatctgatctactggtctctttttcataaattgtccgctcaagggaaattttaggaataacacactctcccccatttataacatcggcaccattctccgtaagagctataaaatctctatcttttaagtagagatagccattatcaatgagggtatttaccaggaaatacaatatacccaattgattacgagtaaattgcttttcagctgcaaatctaaaatttctgagcatgttaccttgcccggctttaaagcatcttgatttttgaaagaaatcaaatatatatgtaatataggattctaaaatttcttgtttcataagtaatatcattgtctttgcaaaagtacaaaataattggcaaccaataaactatgctcctcctattctttcaaaaaactcatgtcttcagacaaatccaaccagttgcttatccgtgaggctatccgcaagatagccttgggacggagtatggagcgtatcaatctggctcccggaggcatgtccggtatcggtacggcccgcatgatacacggctatgtcgccaagatacacgacaacccctcggacgaggagttttccgactacggcggtaccattgatgtcggcgagtacccggacgagacggcctccgccgaacctgttatccataaaggcgtgttgctctcggccgccaccaacagcgaaggcggcttcctgatcgtccccgcacttttttccgacgtgaccatcttcatggatgccgccacccgttatgcctatgtggttaacttctcccatgtggatatcctgcggctcaatgcccgcacggaaaccgtcatcggcgtgaccgaaatggaggaactggatccggaaaacgactcttccccggactacgacgaactggaaaccaccggtaacgagacctccacccactatacgccgacggccgtcacaacaaccgttaggaatgacaaggacaaggaagcgacaaccgttatcgatgcggaaagcatcacgcatacggtggacaagtctgaagtcagacagacagcagataaagtggtacaaaaggtcaattccacgaccg

SEQ ID NO: 16 - DNA, 2851785 bp, Alistipes putredinis (residues 1,425,894-2,851,785 of 2,851,785)
  source 1..2851785: mol_type = genomic DNA
ttgccgttgccgacaacaaggtgacgctcggtgacgagaatgccaccgagccgctggttctgggtaatgagcttgcccggctgatgctcgacttcctgacggaatgttcgaaaatcatgactcccacactgatgggcacgatgtcgccgatcaatatgccgaacttcatctcgctgacatcacgtatccagaaatttctttccaagaccagctataccaaatgagcgtacaactgcatcccgatatagaaaccctcgacaaggagagcctgtgctattccatctatgcacagctgtaccataactttttcaatgcccagcagaaaaaggacgacgagcatccttacggcatcgaggaaggcgacgagaccagcctgagactgaagaataccgcttacggttttgcatccgccattgccggagccgttacgggagaaggcggttccggaagcggtggcttgctgttggattacctgaagaaatcgggcggtgacatgaccggcaagctcagtgccaattacggtttcgaagccggcattggaaacacccgtatcctggaaacctattcgcaggacattaccgatccggaaggtgtggtaactgccatcgagtacggtatcaggattaccggcaacctgaaagtcgggggcgacagcctgcatatcggcggcaggcagttgctccgttacgacgcggacaaggccaccgctacaatcaacgcttcccatatagactttctggatgcgacggtacattccaaaggggcatggattatcggggacgaggatacaggaatatccatctccccgacacggctggccgtgggcgggcaggatgtctatcatcgtggcaacgccaatacggacacggtggattggacgatgcgggacggcatggtgagacggaatctgacggtgcgagggagtacggtcatggatggcggactgaaagccttgcaaggcgtggaactgggcgacaaagggaaatgtctgctttcgttttcggaagaggatgtcgcgctcggcgggttcctctcgttcctggacggattcggcatccggatcggagatgttcccgtactgctctgtaccgacaaggacaagatacagttcgggagtatcggcggtgaccttcttttaggcggcgaccataccccgaagatacgcctgttctccggcatatcggacgtggacggcgagtgtctgatgctttccccttacggaaaggcttgttttccgggctcgctgactgtccgccacaactacggcgccgacctgctctcctcataccgggtagacacttccgatgaaggtatcgttatccacaagcgcttgcggatgggcacagcagagggatttatgttcacaggcgacagggagcgcgtatcgctttcttccgaggtaatctacgaggaagaggacgtaaggacggctatccctcacagcacggatttttcacaccgtccgtccgtgagctgttatgccccgcagaaccgtcacagcgaatcgttccatatccgcaccgatgccgatttcgttacggtcgctgttccgttggaagcagccgggcatatcggaatccatgcgtcgcccacccggattactgacagaatcctatacttgacagaggcgttacgcctgcaagcggtggaggacggtatccggcattacggaaacagcgtctttaccgggtcgctctcttcggagttcttttccccgggcctttccggaagcggatgggctgtccgccggaaccggacgacaggaggcgtctccgccacattcgacgaggtggtggcccgccgtaagttccgcgcctatgagttcgaggtcgaaaagacttcggtaaccaacggttccttctggatcagcgacagctgttcgggagacaccgtggaaaaactgtcataatccatgtccgtattccgttatccgacatacaagatccgtattgcccccgactcgcagaagacacagggactgcaagccggggatatcatccgcaggcaatatgccgaacgggagcgtaccgtctattcgctgatgtgcgtgacagaaaccggaacggagcttgtcggagacaaggacgccccttatttcatcggggcattgctggacggggacgaaccgcagggcggtgaactgctggacttcgtgcggattaccaacctgttcgatacggcacgtagcggcgccttgtacctgacggcttctgacagcgattcaccctatatggatgtcatcgacggcatggcgaccgaacgctccctgtgctatcccgtcatggacggaggcatggcgggagtgccggacaagtccaggtacgccgtttatggcagcatgctgcaaacggaatatctggatgccgattcggaagcgacacgcattgtccgcattatccgcaacgcggaaccggcaggaaacgcttccttcgggctgatgctgacattggaagaaccggtcggatacccggagcgcctgctggtatcgttcaaggtcaggtcttccaaaacatcaggttccgtaccgatccgattcggctatacgaaccgtgaaaagacggatgcggaagatgaaatctccatcggccgggaatggaagtacaagttatgggtcatcaccgtggattacccggcacagtacagccggagcctgtttcttgacctgacatcaagcctggcctccgagggggactggtgcgaggtcgccgacctgaacattgttcgtcttgcctccgtatccgctttcagcgaggcgagcaaggcccgtgtgggaaaggtcagcggcatcatcgatccggtcttcggcatgttggatggttacggggcctatttccagaatctctatgccacacgcaatgtcaatatagccggcacgcttaccgcgggagacgagaacggtttttcaagcacgttttatgtgggcaaaatccacaagaatgtcatacccgacagcctgtcctgccggttcagccattcggaagagctggatgaaacatctcccgccggactcgggcggtgtgtacggatagccggagacagtcttcttggtgcgcaaagtgccgcctggcgggaggctcatacaggagtctgttattgtttctcagtctggataaaagcggaagatacggcagccatccggttctatcaggatgaacatcttgtcggtgatcggacggtggctgccggtaaaggatgggtccgttataatgtcccgttcctcatacgcgggtcagattcccccgtcatgtgtctcggcattgccgcttccgtccccctgtcgttgtccgcccctcaattggaggccggaaggaacgtgaccccctatcaggcgaccgatgaagccttgtcctacacggacgattacggtgcctggttcaataagggaggtatcgggggtaccatacagaatcccctgttgcggctgaacgaagacggctcgatcgtttcacgggacggttctttcgtcatccatccggacgggacgggccatttcgcctcgggacggttcaagtggggcaaggataccatcgaactgcgcgatgtgaccatccgctgggaagacctcgatgaggaggcgcaggaactgctcaagccccgttccgtctccctgacaggcggcacggcgttccatttcaaggacgagctttcaggcgcatgcgagccggagaatatcccgcttgtggcgaccgaatacaatttcgagccggaaagtcggcagtgggaataccttgccgttgacggcatatggaaagatgccggatgcaatgccgccgtatttgaaatgacacccccgtttcatggctgggaagggcgcgacgtgctgaccctccgctacacggcaacataccgtaatgaaaaaatcagtgcgacccatacctttttcaaactttacgacggatctccctcctatactgtttatgtggagtctgaaaacggcacgacattccgcaacggaatcgtctcgacggtactccgtgccagggtgtacaggggcggtgaagagattacatcgctcattcccgacggcaatttccgctggatacggacgagccgcgatacggagagtgacaggatatggaacgccgcaccgcgttacggcagggagatagagataaccggcggggacgtgtggcgcaaggccgttttcgattgcgaagtggaaataacaaataaccgataatctattatggcagtaaaagtagcccgcgggcaggtcaccatcatcgaccagaacgacgcggtatcgttgcaggcattcatcggctcctcgcagcccctgacacaggtgtacaacagagacaacaatgcctatgccccttcgtgggcggcttctccctatctggtacttaccccttcgctcttcgtcagcggtcaggcggcgaccgaccagatcacctcggtaggcaatgccgcgacgcttacggcaggcgtgaagagcggctcggccaagtggtacaagaacggtacggcgatcgtctccggacaggacagctgcaccatcggcgcggcatcggccaagtatgcccttaccgtcaaagccaaccacatgaccgtttccgctccgcaagtgcgttatactttcgaggcggtttacatcgacgccaacgggctggagattccgttccgggcggagattcagttcacgcagcacctgaacgccggagcgatgatcgccgccgtggcgtatgcacccgacggcatcgtattcaagaacgacgaggtggcgacgctcagggcgcattgcgacctgtggcgcggagcctctatcgacacgacgaacgtcacctacgcgtggggcatcaaggattcggcggtattcgcgggcacgacactgacagctgccgcggcagccggagccacgaccataacggtcgcttcggtaatgaacatggaggcgggaggcaggataaccataggatcggcacagtacaccatttcggcagtcaacgcctccacgaaggtcgtgacgctgacctccgcactgagtgccgcagccgcatcgggagccgccgtttcgtgtccctactacaactccatgctgggtgccggctgggcatgccttacctcgaccaatcctcggggcgtgacggcaggctggacgacaaacgaaatcacgattacggcagatgccgttctcaacttcgagaccttcaagtgcgccatcaaggatacggacacctcggcgggcaacgcctcggcgaacaaggtcgtctgcgacatcatctccttcacggatatgtccgaccccatcacggttgatctggtcagccagaaggggttcaccatcaagaacaacggcaatgacgtggatgccaaagccgtgttatacaggggcggtgaggaaatcgacacgggcgggacagcttatacctatacatggaaactgtggaactctgccgggacttccgtcgtgaagacctacacgggaaaatccatcacggtctcgaaagccgatgtgacggggaaaggcgtgctgatgtgcgaggtatcgaaataaacgacatgtcttacaacgaatacgagggtgccaaatactttttgggacaccctcattgcgtctgacgtgtttcccgacaggaaagtcagtctcttggcatggatttcacgatcccgctcacggggtcgaattgtacggcggcattgttgaacagccgctcgatatgcccgctgcggatcatttcggaggtcggcagacagtgaaggacgggcgtatcgataagggctattctgtcactcagcgagagggctatatccagttcgtgagtggagaacagaatgcatttgccctcagcatgcgctaaccgtgcgagcagggaacacaattcgtaacggttgggcatgtcaagaaacgaggtcggctcgtccaacaggatgacgggcgtttcctgagccagagcacgggctatcataatgcgctggcattcaccgtccgacatcttatccatcgtgcggccggcatacgcctccattccgaccgaagagagcgaccgcatgacgatttccctatcttgaggctgcatgcggccgatccagttggtgtaaggggcgcggccgatagccacgacatcctcgcaccgcaggttggcgatgcgtgtgcgctcggtcgtgacaaatgccagttgccttgccttctccggagttctcatgtttgcgatacaatgtccgtcgagcaggattttaccgcaataattatgattcagtccggctatggcacggagaagtgtagatttccccgtgccgttcctgccaataagggcagtcagctgtcctcttttgaaagaggcatcgaccttatcgagaagcctcttctctgcgtagcctatggaaaaatcgcacagttctatcataccgtcatcgatttattgcgtaaaaccacccatacgactatcgggattcccagcagtgcggtaatggcatttacgggcaaagtgaacattttggaaacgatatcgcaaagaagcaataccgccgcccccgagagaagggttcccggcaggagcacgcggtggtcggcctcgcggaagagcatccgcgcgacgtgaggcatggcaagaccgatgaagccgatcgggccgcagaaagccgttaccgtgccggccagcagcgtcgtcgagagaaacagcagaccgcgcgaacggcggatattcagtcccatcgttacggcatattcctcgccgaagagcaggaggttgagcggtttgatcgtccatacggccagcagcaacccgacgatgaccgacggaaggaggatggcgagctgcggcaccgtcacgtcgccgagcgaccccatcgtccagatgacgaacgcctttaacgcctcctctttgctcagatattgcaatatctgcacgacagcgctcacgcctgacgagaacatcatacccaaaatcaatatcaccataatgtcctttatgcggtgtccgacggcagcgattacgagcagcacgacggccgcacccagccaagccgctccggcgatgcctatcgacgagccgacgcctgccagcaccacgagcgccacgccgaggcttgcacccgagctgatgcccagcacgtaggggccggccagcggattgcggaacaatgtctgcatctgcaagccgctgaccgatagcgccgccccggccagcagagccacaaccgcctttatcagccgtatgttcagtacgattttcgccgtagtccgcgggcagtcgccgcccgtcagggccgcccatacgtcgccgacgggaatgcgaaccgcgcccacagccaaatccaacaggaagaggccgaccgtaagcacggacaacgcggtgaacaggatgacggggcgtgaacgcatctatttcagttgtttgtagtatacgaaatcttcttcgaccaactcggggtggaatatcttcacgaggtcgcgcagaagaaggtcgggattcacgacggccgattcgtagtagtcgttgcctccggcggcattggtgcgggcgttgttgttatagacatagccgtttcggacgcagcgggtatcggcgaacttcgggcaggcggctttcagttcgtcgagtgtgttcgccatgccgacgttcagccacatatcggcctccgaagcgagcaggtatgcctcctccaagtcgataggcgtcgaagagttgcccgtgttcttcttgtagatgtagtcgcctccggcgtcggtaatcagccgcacggcatagttttccgtcgagggcatgaaccacgaatcgccgtagggcgtattgagcatgaccgacggggcatcgagaacggcaccggacactttctgtttcagcgcattgtatcggatcggaatatccgcgaataccttttcgcccttcgcgcgtttcccgacgacctccgaaagcgccaccagccattcggctttgcccagcggagattcttcgagataatcgccgacatacatgaacgggatgccgagctccttgagtttgctctccatcgcactggccccgttcacgccgaaaagcagcacaaggtcagggtcgagcgacaacagaagttcataattgatatttccctcgtaacccacgtcgccgatgctgtcgcggcgtgcctgaatgtcgggattggagatatagtcgagtcccgaaacgccgaccacacgtgccgtctcgccgatggcgtcgagcatggcgatatgggtcgaggacatcgccacgatgcgctgcgcatccccttcgaggacctgcccgtcgaaaccctcgggaacgggttccccgttacgggagatgaacaaccgggtggtgacgctatccgcgccctgccacggattcatgacggaaaccagcacgctctgtctgccgtctgctctttcaatcttgaatcccgaggcatattcgggagcgtaaagctgtttgttgaaatcggcaagttgggaactcttgccacgacagcctgcaaatgccagcgcaagcagcaccatcaggctcaaattctttaatactttcatatcattaccttatttacgtttacattattttctgcttttcccgaatttcggggtgatgccgatgaagaactcgaagttgatgccgggcataggacgcgacagcaccgagagatagtcctcgttgaacaggttattgacggcaagtttcaactgtacatccagcggtttgaacgacagcattttctccagtgagatattgctcatgaaataccggggcaggtggcctgtcagcgtgtaatcgttgctcgacatggtgaaacgttccgagtagtaagcccacttgtagaggaacgcccacgtccgccatgacagccgtcctgtcagcgaggcggagtgctccggcacgtaaggcagttgttttcccaccgactggtcggcgggcgacatcttttcgccctcgttgatggagggggtccacgaataggaaccgttcaggtctatcagccagtcctttgccggctgcacggcaaggttggccttcacttcgacaccgtaggcatggactttcttcacgttgcgcggcgagaagaaccccttggtcgtcggcagccagatgatccagtcgtcgatgtaggagtcgaaccagcttgcgctgccgcccagtttatataccccctttttgccgacatcgaaactcactccggcgtcatagctgaagccgtgttcgtttttaaggtcggggttgccgcccggcagaaagtagaggtcgttcaaagtcggaaaacgatagttgcgcgatacggaggctttcaccatcacgttccctttgcgcgaaatcagtccgtcgatgaagaatgccgggatgagcggagcccatttgtcgcccgacatctcctcgcgcaagaccagcgacaagcccaacggctcgacaggctgccatttggccgatacagaaccggagagctcgacacgccccttgtcatatccgacgacggctttgttgccatcctgaaggatgatgttcttgtcttcgctgcgcacgagatgctggtacacggatacgttcgaggtgaagaaccatttcctgccgggcgagtattccgcttccgcctgtccgtagaacgtgtttatcttgctccgcgaacgggtcatggaggcccagttgtccggcgccacctcacgacggtagtcgtaggccatccacgtatggatataaccgcctttcacgccgactttccatttctctttgatatggtcccatgacaggacaccacgaaacgtctgctcccgctggcggttctcgaaggcggtctcatcgccgtaatcggtcgtgagcatcggcagttcccggttggagttgatataccatgcgttcaacccgaaacggtcgcctttcagggtgttgtaatatacctcctgcaacaggtgcaggtccttgaacgaacccgatcggttgcgttccttgggatgatactgtccgatgatgttcttctcctcgtcgtagatatttatcttcttgtcgtggttggtgtacttgtaatcgttgggcgacgacgaatagaccgcgcgggtcgagacctgccatcggtcgctgccgtaggtgaagcgggcgaactcgtcgaacgtgcggaacgacccgatgccctgcacgtattgggcatggaagccctcgccgacctgcggcgtagtaccgagtttgacaagtccgccgagtccgccgcccgtttcattcaccgacgacgtgccatgaagcagcgaggcctgatctatgaagtaggacggtatggtggaaaagtcggtcatacccagcatgggattgttgatgcgcatgccgttccacgtcacctgcgtgtggctgggcgacgtgccgcggaaagcaacggtggagagcgtggcgcgtccgtaactcttgacgaacacggacgaattgaacgtcagaatgtcggccatcgataaggcaatgttctctttcagtgcgagcgagtcgaacttcgtcttctgcacgccgatttctttcatcgggcgtttgccccacaccgtgacctcgtctatctggtggatgcgtcgtgtgattccctgcgcggacaatacggacggacagacgagcagtagcgagaaaagtatgtatttcgtataaatcatttgattccgtttttagggtgggtattcgcggaaaaatgtaccgtggaggatgccggcacggacgtttgatgcgggtcgaacccattctcttcaagcagttgtccgtattcttcctcgaacgagatctcctgatggattgtatgctgctcctcgatgtgccgtctgagccggtgaaggtcgctgaacgacacgctgaacgagtcgaatccggcagcccaaccggagaagtcggcatattccggggttttctggtataccgttcccgtggcgcctttcaccttgttcacgatcttgctgaaatccccggaattcggaatctcgacaagtacatgcacgtggttgagaaaggcattggcggcatgtacgcggcaacctttccctgtaaaaatccgtgtcatccgctcgagcatcaatccttttcccgttgtcggaatcgtcatcttgcgtcctttggtaacgaagatgagatggtataggtgtcgtatcctgcccatcacttccaacaaaatgcgccggggattatcccgacatagaattcatcgatcagttcaccttcggacgagtagcggtagacaatgccctgctgctggtagtcgatggcatcggccacgtagacatcgccacgcacggggtcgacggtcaggccgtaataaatcgtaccgctgtattcgaggaacgggcgcacgggaacacgttccgcatccacgtccatcgaccatatgtccttgttgatccagtagagcttgtcgcccgtaccgttgagctgcacctccgaaggccagtcgcccatcttgaacttgaactgcttctctacggtgaacgtctcggcatcgatgcggtagagagacggggcttcgtagccgtagggcgaaccctcgtacccaccgtcggtgatcgtccacatcttgtggttcttgtccattaccagcgaggtgggctggatgccgactttcagttcttctaccacctgatccgtttcggtatcgatcttgatgatgcggttttggtacgaccagcagttgcaatagacatatttgccatactgcaccatctgctccgtggagccgctttccatcgtcatgtccggcacctggatgtaaccggtgatttcatatttcttggggttgatgatgaagatgcggttgtcccacaattgggtgacataggctttctcgtcgctgaggaaatggatatagcgcggcgaagtcaggttcgtgatacggcccacctctttgaacgtattgaggtcgatggcgaaaatcacgtgggaattgttcaccacgacccagcccttattgtcgtggatgcacatcgattgcgccacgtcgcccagcttcatgccgttggcacggaagaacacttcattctgcacctgttgggtttcggggtcgtagtacgacaacgtggcattgccgtactggaagttgccctcgttggtgatgaacaacccggctccggtagcgttgaaatcttccaccgcatctccgtagtcccactccatgcagcccgccagcaacagcggcaacccgcatagaagaatgatatgtcgtatcagatgtttcattggcttgttataaacgggaaagagtaccggtctttcggccaataccctgttcccttgtaaaataatgggtgttactgctgggtatagcgaccggcttgcatatcctcgtaggtggggttataaccgcaattggttacaagccagtcttctttcttgatttgctcttcttctacaaaagatttgaagaacgtataatcaacaaaccgtgtcaaccggataaatcgaactcctgagagttttgttaaagttggcatattgaaagtcgtaagcgatgctgcatttgcagcacaaagtgttccatcaatggcctgcaatttggggcatgaaatagtttttacggcacgaacagtcataccaacacccccgacatgttccaatgacggaaatgtaaaatctttatttgatgccataaaatctaaagaaccatataaaatattattaatcaccccttctttgatatattgaggattgcttgaacaaccgactgactttaaattcgtaaaaacataatcatagttagaaacagcgttcagattaccgataatacataactgacctccgacaatttccaatttcgggaacgagatattgtttgccattgtagtttcgatgcttaaatatccatctacacttaccaagttaggggctgaaacgcctttttttgaacctcttataatttccatattcccgtaaactcgttcaaattggaatacaggatctgttgtcatattgctagaatacttaaaattcttaatactcttaaaattcaattctggatctattccaacacttgaaccggtaataccgctcggagctagaaacatgctaacttgcgacatatcctcttttgtgataatttttgagaatatagtcccgtctgtaatagaaattaaaggttcgttatcctcaaaaggtacaaaatttactttgctcaaatctaaaattcgatcagaacactccaataaacgcagcaaggtcagtcctccgagttgttctaatttactccaatccggtaattttttcaagacttggaatttagatattgtcaatgtgcctttaacaatcgacaagttagacagtccatctatttcttgtaatttattatttcccgtagatgtaaaagcatcggacgcaatataactggaaacgagattaaggtcgccgtttactaccgataattccggcaatgaaagggtctccaacggaatcggtatagaagcaaaatccacacttccaacttcttgtaatttcggaaattccaaagaaatcattttgcctaaattattaacccctaagcgaccgtttacttttgtcaattcaggaattctcaaagatgtgatttctcctcctggttctccgtcacttgtcagacactggagatcaaaatcctttacgacagtggttaatttagggaattcaaaactttgtagagatgaagtcctgaatattatatttccatcaatcgtttcaaggttgtcgaattgcacatatgctacttgattgttgcagacaacgatgtcgccagtaatatgctgcaaagatctcatactgaccatctgcaatttactgttggtcgcaaaggcagtttcagttcctatttgcaaacctccaattgaagtgatattatcaagtcccgtaagatcttgtccaacataacttttccgaatgatgatgtttccttcgacttccttcaatatttttaatgcggcgatatccgacaattcttctgcatcctcagcatccgacccgataatcaaatcacctttgataaccgttacgtccgtatcaatgaaagccgtaacatccgctgttgtcttcaattccacatccccttcatagcgaatctcgtctttaatgactttatatgtataatcattcgcttctccattgtaagaggttacacgaaacgttcgttccgtatcccagtcagtaatgcttgccggatcgggaataattgttgccgaggatgtgtatttgaattcgacttgagcattatttaacgaaacagtatatggaactgttatggtaattatattgtcaattatttccgctgtataggattgacttgccacagtcatcacgactgatgtgataaaattgtcatcggcatcagcaggactttctggagtctgattatcttctgaacatgataaaaaaagaaatggggcaatgaatagtaaaagccaaaactgtctcatattattgattattagttattgataagtcttcaaatgaaaatacttctgtggatatctctccaagccaaccacttttcgataatactccacactgaactttgataaagtctatatattgcaattttactggagtcccgtcatgatatattgcattggctattttgaatccgttgcgctgaccgctaccatcaatgacatttcctcctaccagattatctgaacccatattatccacatacccccactcataagcgttattcgcccaatatcctgtaacgggatcttgattgttgcgaggagtcagacgcgtcccatataatgtatagctatcttctttaatccaattgggataataatattcttggccatggtatgcattcatatcgacagaacctgaattaccttcactatctacccacggagtatgtgctctgggtgcaggtctatagtaagttacttcgtagtcttgtattgtaccatcgatgccggtttcagatccttttaattcataccattcatcgtctggctggccattgccatttatatcttgcattacccaaacaatgcccggctcatttgagccaccgctcgaactgttaaaagcatttccttgtattgcaaaatcgtattctcggccactcggagcaatactatggtcaaaaccgatgatgatataaccaccgaaagatcccagtgaaacatgcgcttttttgttcaatcgtttcgttgcatactctatggcttgttggggcgtcgtttcatttcctataaatccggtattttgggataactcattaataaactgtccgggagcaggaatgaattcataaaccttatcccaaatacctgaacttgtcgctgtcgcttgccgatagcgttcttgttccgttttttcttcacaaataaccttaactgtcgttgtaattgaagtattactacgtgttatgttacgtgaaagtggctgtgtgttgggcattttttctgtaacagtaacagcaacgaaatattctccaggagtcgtcggcgtgaatttaaaaaccctgtcggtagcggcttccataatttttccattgacctgccattgatactgtggataatcgaaatattccagcaaaggccgcaaatatacaggacgccctgcaaaagtataacgatccgtagaagtttgtgtataggatggtgtcggaaaccgtacggaataaggcattgtttccacaacttctacgtcgaaatcacggattgtttctccgtctatattggatgcccggattgttatcgaatatgtaccgagttctttttcgtgaaacgtatatgctttttctgttccgacgatttctccatcgcgtacccattcaattctaaaattttcaagatcgtcatgttgaatatctggagataaaatataatccgtgttttgaggcacttttaatcctttagaggggattatgattgaaattgtaggtggagttaactccaatacttctacttttaactcttcttccgcataaccctctggtgtatcaactcgcaatttgatatatagatgttgttcctgattccatgtatacttcaatattgattcagatgaaagaagttttccatctactgtccatgcataaagtgcattattcgcatatttatatgtcggggcaattgtcagttcacgcccaactttgatagtgtaaatgccagtctcactatcgagttcaattataggagcttgttttatttcttcagtaattacatcgttcttattacagcttgtaataaaaaacaaaagtacaagaatactaaatatgaaagccttcataataaaaaaggtatagaactgatttcagttctatgccaaactatattaaattgttattctattgtaacgtcgtctatacaaagatacgccggagtattgagtccatatataggatcgacatcagatccttcaaaattgaattttacactttgcacatccgctacattaatatcccaatatgtccatgtagttacgggggacactgttggtttatcatatcggtagtcggccaacaatttcgatacagtggtgatcaaatttccatctacgtcataacattcgatgttgacttggaaatatcctatattgttgccgtcagaatctttcagattactcaacggtgttgcaacacccgatgttccgaactgattaccatttataatcacaccataggtatatgctgtgttacaataccataaacccttgaatttgcgaggggagtcaaaatagaattcaggtttggccatccactccgtatttccgaaatcagagtagccgtatacaacagcaaaattggaaccgctgtgacctgcccctgtattggccccatctgtggatgctgtattatagacactacattgattctcccaagtataccaccaattagttccagaagtcttgccggcagcagaatcagaacgataattgtatttcgacaacgcaatggcaccactggaaaattcagtatacgctccataagaattggttacagtattcatgtcggagacaaacacaaaatcgggatcgtatatttccctgatttggttctctgcagtatatccataaagcgtgtagtagttctctgctttaggcgaaaccgccatgaatgtttcatcgaagtcatcgaatgtaatggttgtagtgccatcatcattaaagttggctcgggtttcgggagttactgaatcagtttgaggattcatcaaaaagtcatcgtctgaattacagccggtgaacagggcggttgccgtcaacaggaaagctcccgccagaaagcgtaaatttcttttcatagcttacttgttttttaataaaacatatttttaacaaacacaaaaaatcccgttcgcgcaggtttacacgaacgggattatgtttgtcttcaaatatgagaatgactcctacggcattccgtatctgatcgcaacccgattttctcccgcgggtgtaaatccttttccggtcatggcaggtcttctgactcgtcccagtcgtcgcgccttcccagcattacaccagtggcaggttgcggcaaccttgaggggacttacagcagcgggtactgtcccggattctcaccggattcccttttcatccgtggcggcgaaccgcccggaaccatttccaattacaaaaatacaaatattttttataataatatcatttacacgaaaaaaaatccgcaacctgccggaatcattccgcactatactttcagaaaaaggtttcatggcaaagattctcatcgcccggggacaggcgaccatctatgtccagaaggacgggtataccataacccagtctttgggtgaatacgtgttccccgcggatgacacggggaagattctctcgtccgtcactctcacctcgaccgtacgggtgatgtgcggggacgaggaactcacggcctttaccatcggtgcggtgggtaagccggcgggattctcatccgttaccgtcaataacggcacgaagaccttaacctacgttatcaccgccggtacgacgaccctcgccgaccacggaacaatagatattcccgtgacaatttccggtattgtctatcatctgtcgttcgtctggtcgaaagccaaggcgggtatcccgggcaaggacggggtcgatgccgacatgctcgactgggtcaaggagtggaatacgggtaagacgctcatcaacggcaacacggtcatcacccccaaactctttgcgggcacgaaaaacagcgacggcaccgtctccgggatagccataggctcgtttacactcaatacgaagacctcctcgggaacgatcgccgcagaggcggtaaacggcatctatggatttagggatggctacaaaaccttctatgtagataacggcggtaacgcccagttgggttatggcgaccagtatgtcaggtataacgccacgacaggcaaggtcgagttcggcagcggagtgagtctgaactgggtcggtgcgacctacatcgacaaggacggcgtctttaccggaacactctcggccgatacgattaagacgatttccatcagtgcttcccagatcacatcggggattatcgctgcggcacgcatcgacacggcggcgttgaaagcctccttgattaccgccggaaacatcgaagctctgaccttgaacgttacaaaagggaaaatcggcggctggacggtggatgccgactccctttaccggggtacgaagaacaacactgtggggagctgcacctctgccgcaggtagcattacgctcggctcgaacggtatccggggctataaatggcggctggatgcctcgggagccggagcggtcgcgggcggcaacatcgcgtgggacgcttcgggcaacgtcacgttcgcctcgacggtcagtgccttgtggacggcacctatcggctccctcaccacggctttgggcggcagcggctatcccaagctgacgaagatcacggccgacggaatctataccggcagtatcaccgcctcgcagattaccgcaggaaccatctccgccgaccgcatagcggcaggcagtatagcggcctcgaagctcgatgccgccagcatcaggtcctccatcatcaacacggactatatcaacggcctgagctgtaccttcaccaaaggaaaaatcggcggctggatgatcggggcttcggccctcactgccacgcatatctcgatagacagcggcaacagacgcatcgcggtgtacggggccaattcgggtgtcgctagcgggcagcgggtgcagctctactacaacagcgacacggacttcgggctctataccacggacagtgcagggtactgcgtggcacagctgggttcgagcaacagcatagccggctggacgatcgacacgacttccattcgcaagggcaacgtgtcgctgggcagcgacggctcgatcatcaactccacgaaatggaaactgaacaacgacggttcggggcagatcgcctcgggcaacattgcatgggacactgccgggaacgttacgttcggggcttccgtatcgctgcaatggaagaacgacatcgaagcggccaaggttacgaacttcggctatcgatattacaagaaactcatcatcaacggcgacgaagcgacctattatccagtcgttttcaaaggtggcgaccagaacatcaaacgtaccattctcgtccgtcggggatatgccgagcaggctccggtctcgtggaacacatccacgcacaaaggaggtctgatcgtacttatcaaaaccaacttcggcggttggggtggcattgcctattcatgggatatctatgacctttccgagacctactgccggatgttcgccggggcgcagctgtgcggcaactactgcatgttcgccgtcttcctgcgtggcggcggcgatacgggtgccgtgtaccacctctactccgaccagccgatagagagcagcagttatagtccttcgccgattccggcagctccgcaaatcgcttacggcaacgaccttatcttccagagcggttccacacaagcctatgcccccgcgccgcgcaccctcacggctgccgtcgaggaggagatccgccgccatcggttcattgctctggcgcaaagcacggacagcacgcttgcggcgcacccgctgacctatatcggctcgacagggatttacacgggcacccttaccgcggcgcaggtcaacgccgtggcgatcgatgccggcagtatcaagacgggaacactttcggcagaccgtatcgccgcgggcagcatcagcgcctcgaaactcgatgccgtgggtatcaagtcgtccattatcaataccgattacatcaacggtctcagctgcacgttcacgaagggcaagatcggcggtttctccatcggcagtgacaacatgaccatagggaacgtcggagctgtgggtgccatcccgttgcaaatccgttccgcctccacgggcagcggttactggtacacgggagcctacaagccgctgggtatatgccttacgtggtatcagagcagcaatgcagggcatatcgtcctcgggcaggtggcggcatccggcaacagtgtcaagaccggattcataggtcttcagatgatgtcatgggacaatctggaatacttctgcctctcggtgaactataccaaaagcggcagcaaggaggtatacaaccgtatcgcggggtgggccttcgaccacaaccatatctggaaaaacaacatctcgctgggcagcgacggatctatcgccaactccacgaaatggagtctgaacaacgacgggtctgggcacatagcctcgggtaatatctcatggaatgccgccggcacggttacctttgccgcatccgtatccgcccagtggactacgggcatcacgacggcgcaggaactcgcttcggccatggcgttcgggaagatgctctaccgcgacccgactttctggaacggaaacaacggtgtcgtggtttacaacaactcccagaacggtatggtgaccgttacccggcagcaggatgccacggcacccaatgacagcaagtatgtcctgaaaatccagaccagcggcagtgccagccctcgcaacggaggcttctatttcggggcgaaatgcggttaccgcaaggtgctcgtcgcccgcattatcgccaagatccccgccggcagaaatctctgttgggcgacgaacagcgtcggcacgggaggttcgcaccggtggcttacgtcgaacgccggcacgggcgactggaaagaatacgtctacaaggtcgtgtgcggcaccgccgatttttccagcacccatttcttctacgtggacggcacgcaggggacttccgatacgcctgtcatctggtatgtggcctatgccacggtcttcgaccttacctccacggagaaatacacgaccaccatcgatgccaacggcatttacacgggaaccgtacgcgccaaccagattatcgtggattccgccctgactgtcggagggagcagctataacggcagcatctccgtcaaggatgcgaacaatagcgtaaaggtcacgctggacaggaacggtatcacggccgtgagcggcaagatcggcggctggattctcggaacaagcgccctgaccgcttcggctccggcctcggggcaccgcatcgttatgggggcttcaggatatatttaccacgacaacccttccaccggagtaaactattgggcgctgaacacggacggttccgccacgttcgggtgcgggaaaatctcctttgccaatgacggatcgggttatctggccaaccagaatatcaaatgggacgcctcgggaaatgtcacgatgacgggcaccatcaacgccaatgccggcaccatcgggggattcgtcatcggtcaggggcgcatcggctcgacggcgacaggaaccggctcaggcggcggccttgccatctacgacgacctgttccgcgtgggggacaccatttcgtatgtcctgttcggcagcaacaccataccggcatccgccggcggatcatgtgccaccggacgtattgtgaacaacaaggtgaacagcatctttaataacaactacgggctttatatcgatgtcaaaaacggtaaccgtaactacggaatatggtccaatgcctctgttatagcccctgcctgcatcggcaacaagatcaagaatgtctatttcacaggcagcggttacacgatcgatttctcgcagttcaacatctttttcgtttatgccaaccagaagtacagcgtgaccctgccgtcggcatcgtccgtggccaccatgttcggttactcgactctgccgtcggacttcgcctgcatatttaccctaatttacaactacaactgggggaatagccttgtattcaccaatatccgtaaccacaacggggatcttgccagttacacgttagccaagggagactccattacggtattgtgcgccaattacccctcgttccattaccagatattaaatcactcttattaaaaacttttctgctgggaatatccctacacttaataaaaacagaagcgaattatgaacatcaccaacgtaacggtaaccaaggttgccgaagagagcacggagaatgccgactaccagttggaatattccatcgtcaatgacgcgctgacccgcgtccacgcctccatccgcaagaaggatacggatggctcggggaacgctccgcagataggtatcatctacatggaacaaggcgttatttcatgcaacattcctatgggagagccgcttgcacccctgtttcatgatttcgataccatgatcgacgaaataaaaaagagtaacgtacaaaatgcataaataatatggaactgtcagtcaaagaccgcctttacctgccgtcctttttgccggcacggggcaacttcaaggacttcaacctcaaaaaagagattctgcgcaagatcgccattccggacgaggagcgcaaagccatcggtcttcacgagaatgccgaggacaagcgcatcgaatgggatgtggagaaggagaaaccgcttgccgtggagttctcgggggacgagatggagtatctccggaaagcctgcgaacgcatctcggacgaggagcttccggacgatatgtgggctaccgtgtcgcgcatctacgatttcattcaggagaagtaaaccatcctttctttctgccgctactcttttgaaaagagtgcccggtcgtactctgatgtatggtcgggctttttgttgaagtatcgttcatggcaagacaggacataacaatggacgccgaatacggtgaggtggagacttccggcaatatcgccggcaagagtttctacgacttccgcctgctcgatgccgtcgcgggtgcggacaacgacaccttccgctacggagagattaccgtccccgtcggcttcgtgtacacgtataacgacggcaaagggttccatgtcaggattccctatacgcccgacatgcgccgcctgacggtccgtctggttatggaaagcggttcgggcggcacggagtacctgagaaatcctgcgacgggcaaacattggtttcccgtcgtggcggagacggaagccggcacggccgatatcgccctggccgcatttttctccctcaatgagaagggagtctacaacctgctgtcacgggacggttaccttgccgtgtacagcggctcagagaccgacttcgaaataggagccgccaaagcccagaacgagacgtttctgctgaaagcttcagccggaaatctctaccaacattctacgacaggtgtcggcctcgtcgactacctgcattcgagtctggaaaacaacggtcttgccgccaaactgcagtcggaattcctgtcggacaaggtcgtcatcaagaatgcctatatggattctgccacgggagagctgcttttagaaaccgaggaaaaggaggagaacgatgggtaagtacagggtcgtagccggacagaatatctacgatgtggccctgtacctgtacggcagcatcgagggagtcgtggatttgctcatcaacaaccccgatctctccttcgccacgacattgactgccggccgggaacttgtctacacggacgatttcgttatccgcgccgatgtagtcgcctataacgggttgcacggcatcgtccccgctaacggtgaacggcatgtctatcccaaaacgttcaccttgccgcttgctgtcgtcctcacgctcgctgccgggatcatcaccgtgcagtgtgccgtttccggtgcgggacagctggaaatcgactggggcgacaacagcgacaccgagaccgtcctcctcgcggacacgccgcagctgctcacccataccttcgacaacaaagtcagggacaggcgtcgtatccgttggtttaccgatgcctgcttccggagtatcgactggagcgggctcaaaccgcggtcgttggtactggtgcagacactgccggtggaggagctgacgctcacgcacgccacactctccttggagagcctgcggctgctttccggaacctacagcctgaacctgtcgaattgcgcgttggccgatcttgcaccgcttgccgaatgccgggaactgatgacactcgacctctccgccgcccgactgaaaccgacagtcatagatcattacctgacaacccttgtggaacattacggcgaccgacggaattgcacggtcattttacctacagccccgacgggaacctatcgggagccggaccgggataccgaaacggggcgctaccgtatcgcctcgggcatggaagccgtatgggtcatcctgcacgaggaggcctggaatgagggtggcgcgtggaaattcattatcgacgatataacctatacagtggaatgagccggacgattaaggagatatacaatgaagccgtgcaggaacgcaaccggcggctggaactgacggagttcgccagcgactcgaagctgtctgtcatgaacggtatcctatggaccgtagccgctgtcatctacagtttcgagacgctgcttgatgtcttcgcggtggatatctcggaagccatcaacaaccggatcaacggcacgccggactactacgccaatgcgctgctgcaataccagcagggcgacgagctgaccgtccgcgaggacggactggctttcgggtatgcccaggtcgatgagaccaaacgcatcattacgcaggtctcctatgtggagagcacggacgacagcaacctcgacagcaagctggtactgaaaatcgctaccggcacgaaaggacatctggaagctattcccgccgaggagctggtgcccatcaatgcctatatcggcaagctgaaattcgccggcacacgcatcgaggtcatctcgaccaaaggcgacgtgctggtgccgcgtcttacggtcttctacgatggtgccgttcccgaggcggagatgtacgacagcatcgagacccgtatccgggactacattatgggcatcgacttcgacgctgcggtctatgtctcccgcctgacggatgccatacgccgtgccgaacacgttacagacgtctatatcgacgagacggcaatccccgagcagggcgtgtttattgcttgccacgatacggacgggcaaatccagcccctgcaacgtgtcggccgcatgacatacaccgcctcgggctacctgaaagagtcctcgcgcaaggacgaggagtcggaactgccgaccttccgggaagccatcacgctcaaagtcgaaaaccatgagatataagctgcccatagaccgttcggtgaaccggctcgtgccgcactacctgtcgggacggcggttcatcctcttcgtgcagagctgcctctatcccttgcaaagcctgaacgaacggttccgtacgtttgcacgggaacggcatatcgaggcgcgcatgacctcacaggtcatctatttcgagtggttcctgaactaccggttcggtaaatacatcaaggacggcaaggaccgcatcttcatcaaggacagcacgagtgtcggtgtggacctgtaccacgaaggggcggaataccagcgtcctttcaccgtatggtacaacggggaacaggttacaacggacaatgaggcggaacgcccccgtccgttctacctgctggcggaagagaagctgatcaacaaggtcagcttcatggtctgcgtcccgcccgtcaccatacctccgcgggaactggtctatatgctttcctatgtggtgaacacctataagacagcaggcaagacctacctgatcaagatcgacgaagacgaatacacccccaataagaatacaggacaatgaaagaatatattgcggaaaccggcggacggtatacctactcggacgatatcctgaacttgcaggaactggctctcagcatgagtgccgtttttgacggctgctcggacttcatcatctccggatgcgagatcgagggtccccgcgtctccccgggttatgtctggctcggcggaaaggtacgccgtttcgacggctgcgccgatgctgtctatccctattatatatacgaaatcaaccggcatgaatcggtggtctacgccaatgaggtcaacaagcgcgggcgtacctgttatctctgtgccggagccaaggctgtcccggatacggtcgatccggttactgacaaactgccggcggccatcgaggtgacggagagctatgcaccccggttcatcgacaagttcttcggccgctatgctgtcctgctcgatacaccttttgcccggcagaccgtcaagaaggatctggtgctggccggaacgttcaccgggcagaaagaaatcagctccaagaccgccgtctccgtcagcggcgggaacggctacatgctcaaaggcatcgtcaaggcggacggccatgccgccatcggtgcctacctgcacggtctgcttgtcaacgagattgtcatccggacggacggcacgttcagtttcatgaaacaaggcaaggaactggccagggttacggaagacggcatatcctgcggtacttcgctgaatgaaaacgcccggatcggggctgtccgcatcaagggatacgacatctataacacctcggatgtgacggatgagggttgtatccgtatcaattaccacggcacggagggcggcggaacaaaataccgtgactttgccgtgcatgacggaaaagcctgcaccacacctgttttgaaagtcatcgggcgtaccgccaccctgcaggtcggcggactgctctccctgcaaagcaccggacggggtatcgatattcagaataccgcctatacgaaagacaatgccaggctgacaaacctgattacctggcgcgacagtgccgccgcgctgctcgccaccgtcggcttcgacaccgctgacagtttccgttttgcgctgaggaacgctctgggcgacatcgtgcttgcccctttgggagcggtggatgtgctcggtacgcttaaaatcaacggaaaatccgtgtccgacacctatgtgaccgtcagggcctttacggaggcgatgggaaagaaagtggatgtggtagaaggcaaacagctctctaccgaagacttcacgaccgaatacaggaagaaactggcggctatcactaccggagaactgacggagggcggcgaaggttatgtcacatcgggaaccgtcgcggcggctttgaaaatgaaactctccgccgacgggaacctttccgatgtcatggacaaggctgccgcccggaagaatatcgatgtctattccaaagcggaagccggggaggtatttctggaaatctccgaaggattgaaggagctggtgcgcctgacggcggacgagatcagcgggctgacggcagaggaagccgccgaactgaaagcaaagcggcaggcggccgtcagggataccctcgatgccgaaaagaaaggtaccggggagctgaaactggccaagacctcgaacctgtccgaccttccggacaagggcaaggcacgcaagaacctcgaagtctattccacggccgagatagaccggatgatggacggcaagctcgggactgactccgcttacgagggcattgtcttcacacccgaactcagggacaaactgctggaaatcaagaccggttcgttcgcctacatagatgaaggcggcatttcgcacgcgcaggtcgagggatacgtgatgacctcgcaggttgtcagggaactcaagaaaaaggcggagcggctgatgggcggctacaacgcttccgaaaaggataccatcgccaccaacctgaacctgtataccaaggccggggcggacgcccgcttcgccgcgcttgaaaacctgttccaggattacatcgactttttgaccgggcaaggaaaatcccccatggaagcccggcagctcctgcggaacaagttggacgtgctgtccaaagacgaaatcgtcaaggactacctgcgcaaggacggcaaactttccgacctgtccttgccgacagcggaggcgaaacggcaggcctgccgcgctatcggagccgcctatgcggaagaataccagcccctgctggcggatacgggatggatgcacatggagaacagcggctcgggaacagatacccaggggctgtttatccgccagatcgggaatatcgtgtccatacaggggtatatcaataccgcacgcagggacggcagcaactggggcggcatcgttgccgtcatcccgaacaagatacagcccccgagatacagcgtgcgctgcagcgccgctgactggaacgatgaccacaagtacaaccggggctcctcgttcaccatctacggcggttcgcgcaggatacagctttacgagcgcggtatgtacaatgtcaatgtagaactcaacttcacctattttgtatagtcatgaaacataaactcaatgtaaacggcgatattgaaagccgccggaggattgcggagcgcaggaacgttcccgtccgtgaaaccgtacagcaaaccattcaaccgcaacatcatgaaacagaagaaaatcaggcggcagccgcagaagaaaccgtctccccggcagcagaagccccgaaagcgagaagacggaagaccgcaggggacgcttaagcgctttcctttcgacgagacacggataggcttcatgctccggtatgagatgccggtagtctatcatctgctccgcaggttatgcgccacgcagcagcccttcgagccggactggcaggtcatacggtcggtggcggaggcatcgaaagacccttcctgcggcaaggcgaagttccgccgctacctggacgagtaccgccgggacggggtctattgccggcgcgggaaacggctcacgccggagcgcaaagcctactatgaaggcatatgccgccgcaagagagaagagtatatccgccggaaccgcaggaggctgcttgccgaagcgcggaacgcgccgggcggcgacagactgctcggagagattaaaagcattcttaaaatgaaacggtaatgcgctgaaggacaatgccggtgagaaacattcatgtacatgtatggctgttccgggtaatttgcctaattttgtattccacggtcgctgcaagacctttccatattgtcaaatgagtatcctctttcgggatacggtcagcgagacatcctctcccaattttatcagttgaacgcggacggtgcaaccgaacccgtccgtcctgttaccagtttctttgcgatgcgggtataccgtgtcgcattcttcgggcatttttaaatccataaaacaaagcgtttatgcaagaagaagaaaagaacaacggcatggaaggcatgtctgtcgaggaaatgttcctcggcgttcaggaatcttatcaggaggcacagttgcgtgcccaggaggagaacagggcgttcgcccgtacggagttcttccgcatggacaagttcgggacttaccgtctccgtatcctgcccatcgctcccaatccggacggctcgccgacacgtccgggctatgagtatcccgtccaccagctgcttctggagctggagaaacccgctacggggaacaagccccaaaagatgtatgtcactgtcacccgcgctaccgatgccggatatagcgttgatcccatcgagacttaccgccgcatggccgtcgaagccgcaaaagaggacggggacgacaaactggcggaaaagattgccgggggctcgttcggaggcggtctgaaatacagttacggccactgtctctatgtattcgacctgggtgaacgagccaaaggcgtgcagatgatgaccctttcccatgcccagttcaaggatctggatgagaggaagttcaagctgtggagcaagaaactggccaagaatccgtcttacccgtgcccgatttcctcggtgtatgacgcctatccggtggagattgaaaagcgcaagaacggagccaagaccgagtatgtcatttccattgacaacgaatcggaaccggtaccgttgaccaaggaggagctgaccgccctgatgggtgcgccgcgtatcccggaaatcatctaccgctacacccgttatcatctgggagccaccgtcgagttcctcaaacagtgcgacggtatctacggcatgtcgctcatggagacggatgaaatgaagacggtcatcgacacgctggacggtgaactgcccaaggaggatatatccgcgttctcgttcgaccgccgtacgaaagataacagagaaaacgggcgtgaaggcggaggcatctcgctggacgaccttttcgaacgttatgacgagcttcagcggcaggaactcggtgagaagaccgaggaaggccaggagctgcgtgcgatgatccgcggctacatcgagcaggaagggctctccgtgcgtgtcacacgctccacgagcaaccgggaactactcgacctgatcgaaagcgagatggagggtccgaagcccagtgacgaaccggaggatgtccccggggaggaagaagagcagccggaggaaacggaagagcgtgccgggcgtccccgccaccgcagataagcctttcacaagttcttgaattctaatccgacgggaggcatccgggcctcccgtcctaatcacaatcacttagtatgaaagagaacaaaccctgccttttgttattgaatgacatccacatctcgaaagacaacatccctgcattccaggccaactggcaggaggccatgggaatttgcagggaacgggatatccgggaagtggttgtcggaggagacctgttcttttcccgtgccgcccagacactcgatgtcctgctggccgtcagggatatgcttgtatccgccgcggaccatgacattcatgtcacgctggcggaagggaaccacgacaaggtgaaccaggaatccctgcgcggatattgtcatgtcttcgaccggcatccgaatgtgactgtcgtggatgagtacctgaccctgtgccgcccggaatggaagttcgcgctccatgtaatgagctattttccggaagacggctcttttgccgaaaggctcggacgattggctgcggaagcgctttccggagaaccggagcacttcctctacatccatgagggtatcaacggggcattggcacagccttcggaaaaggaactgcctgccaggatattctctcctttcgacaaggtctttgtcggccattaccacaaccgtaccgtcattccggggacgggaatcgaatatatcggttcctcgcgccagcataacttcggggaggacgaggagaaaggatacacggtgctgtatacggacggcacgtacgagtttgtcaagaaccgcgtgaacatgcggtaccgtgtcatggatatgccggcggaacgtgccgggttgcacctgatggacgagctgcgtgaaatggaggccgatggtcgctacaaggtcaaggtgcgtgtccatgcacctgccgccgcgatgaaatcggtggacaaagccgccttgctggaagccggagcggcgaaggtagaactggttgccgatgacgagcagctgccggaggcggtatcctcttcgctcttcgagaaattcgacagccgccgcatccgggaaacctacgaggacttctgccgggagaaacagatcgaggatgtgtcgatgggattggagtatttatctagaatagaaaacagatcatgtggaaattaaagacgatagaagccgaaaatctctgcgccttccgttcgctgtcctacatgctgcggcaaggcgtgacgacattgattttcggcgataaccgggacaatgagtcccagcagtcgaacggggccggcaagtctgccctgttggaatgcattgccgtgggtatcacgggcagcccgcttagaaagatacgctcggaggagattatcaacgatgcagcggaagaatgccgtatcgctttgcgtttcatcaacgattccgccgccgaggaactgctcgtcaaccgccgtatcccgcgcaagggggcttcctctgtcagctgtacgctttaccgtggcggcaagcaggtggtaaccgatgaagcggtacagccttcggtggatgcctataaccggtatattcttgacaaactgggtatcacacgcgacgagctgctcaacaatttcatcctttccaaataccggtatgaggatttcctctcgtcatcggacaaggagaagaaagaggtcatcaaccgcttttccaacggtatcctggtggatgaagccatcgccaaagtggaggaagacatcgtgccgctctctgaaaagaaacggcaggtggaactggaactggccgggttggacgggcgtatcgggatgttacaggagcagatacgcaaggaggaggaagccggagccgagcgggggcgtacccgtgtggaacgtatcatgggactggaaacggccatagcggccaagagggagcagatccgtaccgggcacgagaacgtggacaggcttgaggaacagcttgccggagtgcagcgggcggacgaggctttgcaggaactggaagccggagataccgcattggaagcatgtctggaaaagatagcggaaatgatgtccctctttcccgatgcccggcagacggactgggacaaggtcattgccgaaaagaaaggacggttacagaccgccacagagcggctgaaggattgcgatgccgtcttgaagcaggcggaacaggaactgaaaaacaggactgacggctgggaacagttcaagaaggagtatgccgcattctgtgaggcatacagggatcagtccgatacgactgcggagagactgcgggaaatcgacatccgtctgcgcgacctgtccggcagcatcgaggaactgcgtcataaacggcgtatcgtttctgccggtattgacggcctctcgaacaaactggccggctccatcacctgtcctttctgcgggcatgagtttctggtggcagaaccacagttcgacatcgaggccggcatgaaggaactgaagctccgtcaacggcagctcacggaaatcaacggccgtatcgatgagaagcaggaggagacggatgccgtggagttgcagcagaaccggctgaaccatgagcgccggatattggaaggcagacgcaccggatgggaggagcagctggccgggcacgaacgggccatcaggaatgccacccgccacgtggaagaggtggaaagcgggcataaacgcatcgcttccgaaattaccgccctgcaaagtgaaatcgaaggtgtccgccgcaaggtattcgacgaggtgttcggattcatagacgagcgcaatgccgcactgaaccgcggcatacgggtaggcaaggaagatatacaggctgcggcctgcgccatcgacactttgcaggccacgatccgggagctggatgaggcggcttcacccgacctcatacaatcgctcaaggacactctccgtgaaacgcgcgggaagtccaacgaggcggcagggcgcaagacggccgtcgatgcccgggtccgtgccctggagatacagcgggaacggttcgtgcagttcaagacctatctggccaacacgaaaatcgaggcgctcagccgtatcaccaacgagttcctgcaagacatcggcagcgacatccgtatccgcttcgacgggtataccgtcctcaagagtggtaaggtaagggagaaaatctccatctcactgctgcgcgacggcatggactgcggctcgttcggcaagttttcggcaggcgaagccgcccgtgtgaatttggcgaccatccttgccatgcagaaactcgtgaacagcaactgcgacggggacaagggactggatctgctcgtgctggacgagatactcgaggcggtcgatgaagcggggctggcctccatgttcgaggcgctgaactcgctcggcggtaccgtgctggtagtctcgcacgggaatgtggctgaaggctatccgcataaactggtaatcgtgaaagagaatggcgaatcgagactcggagaatagcgtactgacccgggagcaggtactggcgctggacatcgccacgcataccggatacttctccctgcatgaggccgggacatggaacttcaccgaaagcaaacggcgcaacggcaacaagatgcacggcgctttcaggactacgctgctctcgctgctccgtcgttacggcatccgccgcgtcgtggccgaggatgtgagcgtgaaccgccatttctacgacatgcggcggctctcggaactcaggggtatcctgctcgaagtgtgcgatgaactggatatcccggaaccggagttcgtcaacccggctgtcctcaagaaatgggcgacgggagacggacacgccaccaagacgcagatggtcgcggcctgcaaggacagatacggtattgtcccggtggatgacaatgcggcggatgcctgccacctcttctactattacatccgcaggcacaggctgtgacaagccgacaacggtttggattttttccgggcggcggtaatgctgccgcccgttttttcaattgacgctcacggtagctgacagattaggacatgagattcattatcaaccttttcagtcagtggaaacgtggaaaagaaagatgtgtttattgcggttctccagcctgaagacgaatccgcgagacagagggcggaacttctcagaaaatatgtgatgccgcacaagaatctgatatacagcatttgtatcaaatatacctataaccaggaggacatcgaggacaactacctcgaggcgttggccaacttcttcaagtatatggacagttatgacccggcccgtccggtaaagacctggatctatgccgtgaccaaacggcttgtggcggacctgaacaaccgcaacaggaaccgcatgcccccggacgacaatatcgacatttcggaaatatcctcttcgctgtcggatgaggacgaaccgtcgggaaacagcatggggatggacaactaccgcgagttctataacgatgacatcctctgggcactggaccggctcaaaccgatttaccgggaagccctgctcttgcagcaggctggttacaaactcggggaaatcatggaaatcacctataacaacggtactttgcagaccaggaacgtagaaacggtaaaaagccgcatcttcctagccaagacgcagctgcgcaaactattgacacgcgatggagagaaaagaatggattgacggatgccggaggctctttacacggctggtccgcaccacggtgtgggcggattttgtgttccctaccggcggcaagtcggacaggcaactcgggatgtgtttcgacggcttgtgccgggaggtcgtctccgtcagtgcggaacgcctgtccgacttctgtatctgccagacatatgccatttccggatatgataccgcgtatcgcaggaaatggaacgtctcccattcattcggaaagaaagccatcggccgctatctccgctcgggaaaggaacgccgctaccgggaggaccggtggctgaagagtttcgggctgtcacggcatgatttggcgcgggcagtggaagaccgccgcagccatccgttcgggcgttttatttatccggaatacgaggagacgaccaagcggcgactgctctccaccgaagcgggatatctcgtctgtgcgctctccacgctgatgtggacgcctttctccccgtcatgctcaaaatgtgcgaaagcggagccatgccgcagaaggacacaggcgcgctatccggaactgtaccgtatccgctgtgaggcgtggcggaaaaaggaggcgaagccatgagtgccgtcaatccgctcagtgccgagttcctgtatgaactctatgccacggcgctcagacaggaaccgttgtgtgctgtcctagcccggcatatgcgtaaggaatacctgccggaccgttcgttccagcaggtacaggaggcgatagccgtacacttcaagacatacaagacaccgccgtcgtatgccgtgctggcacagaccttccatgaggattacgacgccatcgagctgatagacactttccgggagtatgacgagggacagagtgccgaggtgatgaccgacatgctggagtcctacatcaagggggtccggttgcagtcggtctatgcggaggtcggaaaactgtataacgagaacaaacaggacaaggcggagaagactcttcgggaatatgccgagtggctggcagggttcacgctgaagagttcctcgttcgtcgatgtggccgcgactttcaaggagcgtttcgagaggaaccgccggcgcgaggaggaagaggaacgctcggccgcccctcgtgtgtcccgcttctacatcccgtatctggatgcgctcaatgccggacgtaacctgcgaggtcagctgacctgtttcctggccagcacaggcgtgggaaagtcgcacatcgccaaatggatcggtgtcagggcggacatcgatgacgggctgcatgtgctgcatttccagctggaaggttcggaagaagaggcgttgaacgcctattccggcggactgatttccaggaacgcctactattacgagcggggaaagatttcggatacggagatgagacatctggaaaaactggtcgcctcgtatgccggaagcatcacggtgcgcagttacccgcgtttcaatgcccaggtctcgacactcgacatcaagaacggcatttcggaatacaggaagctcaaaggatataatccggacatcgtgattgtggattcgatggacttgctgacggatgccaaccgccgttcatggggagccgaccatgaacgggcgaagcgtatcgcggtggctaatgacctgaaggacctggcggcggacgaaaaggtatggatggtggtgacttaccagtctaccatcgaagaccgggagtggctgaatgacgagcggaacgtgctgaccgagtacaactgttcggaggccaaaggtctggcccgcccgtgcacgcaccttgtttcgctcaaccagtcatcggctgaaagaaaggagaacgttatgcgcctgcacgtggccaaaagccggttcttcaagaaaggagacactatcaggattgccaccgactacgacaatgaggtgttctatgacgggcagaggacactgaatctgaacagggaataaaaagccatcgatccggatgcggcgtgtcggtggctttttgacttgtaacgactggaatgttgagaatatatggcagcttacatgcgtaaaaccaattccggacagatacgatttttattgtatgccctttgtattccgccatatcgtccgttccccatgttatcaacagcaggttttcacatttcaattcctctgccgcctccaaggctttcagtttccgctcacgggtcttggcgttcgagatatcatacgacctttgttcgaggaaagttcgaatgacctcgcaaatacaaatccgttatttgtagtaattggaaaacgatacttttcattcagtatgtttattgtactgcacaaaaaatacgctttttttatgtagagagtgatcattttagaaaagtacatctctacacctgataatcagccaatgctgattatcaatctccttatttatatattgttttatcgattagacaaaagcagtcattttttgtccagccgggaagacaatttctcttttcctttgggtggaaagaccttccatgattctgccggtctatttttattgggctaatccggattctttttccaaacatttcaaaccaacctgtagcggtcacgactataccttaatatggaactgtcggtacaggaatatcaatatctggtttcggagataacccgcgagacgggtgccaaacgggacgggagcggtaagaaccttatcgttccgcgctgcccgttctgcggaaagtcgggcggtaagttcggtatctacatcggcaaggcgactgcccaccgccggcctttcatggcccactgcttctcctgcggggcatccacccgtacattggagcaacttctggcggctatcggtcgcatggacctgatggttttgcagacagctgacattgccgcaccgttgaacctgcacctgctggagaaggacgaggcggaagaaatagacgacgaactggtgccggtcgaattgccggacttttacaagcgcactttccggcatccgtatttgcagcggcgcggcttctgtttcgacgattacgagtatttcccggtcgggataaccggcaggctcaatccgcgctacgcggactatgtcgtctttccggtcatcgatgactgtacggttgtcggctatgtctcccgccatacctggccgaaagaggatatagacgcccacaaccgcaagaccagacatagcggcgggtacaagatcctgcgttaccggaactccacggaaaacgacttttccagactcctttataactacgatgccgtccgtatggatgaaaccgatacggtcatcctcgcggaaggtattttcgatgtcatcgccctgacccgcagactcgaactctatgacaattcccatgtcgcagccgtggccactttcggaaagaaaatatccgatgtacagatctacaagctgcaatcgaaaggcgtcagaaccgtagtcatcggttacgatggtgatgccgtcgagtcggtaaagcggacggctgaacggctgaaaccctatttcgaggttttcatcgcggacattgctgatgccgccaaagactgggacgaactcacggaagcggaaatctacgggattttcgcctgccgcctgctgtccgtccttgaatacaaactcaaaaaagtacaggaaagatgatacaggaacttttctcatggctcgatgcacaacggataacctatatcccggtcgatacggaagtggtggatattcccggcttcgggcggcttttcacggccgacctgtcgggagtggaatccatcttccgcggcgacggggacaagctcgtgttcaacctgatggaaagtccggatgtgctgatggaagaaggaatcttccatgtggccttcccgttcggcaggaactggtactactatgacctgcgggaagaattccgtttcaacctgctgaaatatatcggccggcccaagcctccggtacatgatgtacctttcgtgaacctcggcatccatacctcctacgagctgctgaacgcctgctgctcgccggaagatttgtgccgcaaggcgaaatggctcgggcatacggctgtcggcatctgcgaccgcaatacaatggccgccacgctgaaccttcagaaggagtgcgccaataccgggctgaaacatatattcggctactcgctgacaatgatgcacgaagaagaacgtgtcgggctgaagatttatgccttggataacgaggggctgcataatctgctgcgcatccaacgggccgtcatggtcgattcggaagacaacaccctccgctatgaacagctgctgatgtatgccgcaggttgtgtggtggttttcgccatccgttccgtctactggatggccggacaccccaaacaggtgaagcgtatccggaaaggtgccgaagcggtctattaccaggtcgacgccaacgaatacaaggcggaccgcatcgacagggagcaactagaagccctgaaatattatttcggcaactgttatgatgccgacacggattcatttacagtagaaccagtcctgattccggactgctactacatggacaaggacgatgcagggtacagaatcgtggtgaacaagattgccacgggagccgcccatgaacagagcgatgaccagtatttcaagacagcggatgaattgtatgacacgctccgtcctctgttctccgggcaatgggacttcgattccctgtttaggcgcatgtgccgtcccacggtggagattgccggacgtgcggacgcctcattcgagaccgggcgaatgttcatgccggaataccgtatgcgaccggaagagcgggaacggtatggtgaccgccgtacgatgttcctccgactgcttgacgacgggctggaccggaaagtgccggaaccggagcgggaacgctatcgggaacggctggacgaggaagtctatatcattgaatcgaccgacaatgtggactatttcctggtgcagtgggatatggtgcgggaggcgcaccggagaggcatcgcaactggtataggtcgcggttccgccgggggctcgctggtttcctacttgcttggcataacctccatcgacccgctgaaatacgaccttatcttctcgcgcttcctcgtgccggaacgctgcgggctcagctggaaagacgaactgacggtgcttgccccggacatcacactcggcaagggcgaacgctatgtggagatggaatctgaaggcaagacttaccgtctgtgcacggatgcccggatgcgggtaatccgtaacggagaagagcggacgatatacgcagatgaattgatgtgtggcgacgaaatcctttttgaccgccgagattgcttgtggaacctaaaggaactcgaaacccatgaatccgacctacgaacaccaccgtccctatgacggttgcgacctttaccggggcgatgcactcgatgtgctgcccctgctggctgaagaaggcatcaccgccgacatggtattgtcagaccctccatacggtacgacacactgccggtgggatgccgtgatagacatccccgggatgtggaatgccgtacagggcatatccaggcccgacactcccgtactgctgttctgccagcatccttttacgagcctgctgggcagttccaatctccgcaggctgcggtatgcctgggtatgggagaagacgcaggcgacaggcttcctgaatgccgggcgtatgccgatgaaggcgcacgaggacattctggtcttctacgacaggttgccgaagtatcatccgatcaagacggacgggcacaggcgcaaggtcgtgatggccgaacaccagcggaaatgcgatgccggcgagatataccggaagcacgacaatttccgggattacatatccacggaacgctatccgcgcagcgtgctgaagttcaagaccgacaagcaacgctcctgcctgcacgcgacacagaaacctgtcgccctgctggaatacctgatacgcacctacaccgatgaaggggacatcgtcctcgactttgcgatgggcagcggcagcacggccgtggcctgccggaatacgggacgccggttcgtcggcgtggagatagaccgggaaatttttcagacagcactaaaccgtataacccatggctgacacccgggaaatctgggtggatatcaagaactatgaaggaaagtacaggatcagcaacctcgggcgtgtcaagagtctggaacggcaggtttcgcatgacggcattacctggatacaacccgaacgcattatgtgccattggtgcgggacgacttcgctctatgactgtgtccggctctacaagggcggtgtcgggaagaagttctccgtgcaccgtctggtagcacagcatttcctgcccgactggaatccgggactggaggtgaaccatatcgacgggaaccgcgacaacaaccgtgcggataacctggagatgtgtacgcaccagcggaatatggaacatgccatagcgggtggcctcaaacgggattacggcgaaaaaagcgtgaatgccaaactgaccaacgggcaggcggaagagatacgggtgagatattcttccggccaggcttcccagaacagcctggcaaaacagtacggcgtcagccgccagacggtaagcgcgataatacgatacaagaaatatatacgataatggacgaggaagaaatttggaaagatattcatcattacgagggaatttatcaagtaagctcctgcggtagaattagaagtgtcggaagatatgtccgtaatgccacatcccaatattggaggaacggacaaatcatcaaaccgtgggtcgggggtacatccccgtattacaatgtttctttggcctctgacggaaaaatatgtaaaaaattaatccatagacttgtcgcagaacattttcttgatgattggaatgcggcaaaggaggttaatcataaggatggcaataagcacaataatcgaagtgacaacctggaaatgtgtaccaggcaagaaaacgtcatgcattctatggtgcataaactcagggatgattatggagagaacagtgtgaacgccaaactgacaaatgaacaagcggatcatatcaggcggttacaccggtcgggagtcatgcaaaatgaactggctgaacaattcaaggtttgcaaacagacgatatgcgatatcgtccactataaaaagtataaaaaatgaaagtgacaaacgtaacaattaaaaaagcgaatgaagcattcaccgtaatggattcgttcgtggggaaaggacttgtggagggcggacattccgccctcccgtaaggcggatatagatgtcgactatgcctccgaccggcggcaggagatcaaggattacctggaagaacggtacaacgcggacggccgccagcgtgtcttttccgccggcacctttaccacgatgaaactgaaagccgccttgaaggacgtggcacgcgtacaccgcgtgcctcactccatcgtgaactatattaccgccatgatagatgacggcacggactggacaggactgttcagacaggctgcctccaacagaaaacttcgggactttatccagacctatccgctggtcatcgaggacgtgcaaggattgctcggacagcccaaagcggcctccatacacgcctcggccatcgttgtcacaccggacacgcgggacggcaggcccgccgaatgcttcgatttcctgccggtccgcaagatggacggggcactggtatcggagttcgacggctattcggtcgatgagatcggattgttgaaggaggatgtgctggcgacaaaggaacttgccaaactgagtgccgtcatcgcgttggtcaaccggaatttcgggcaggaactcaccatcgggcgtatcacgcaggatatgctggaagacgggaagacctaccggctgctctcggacggtaacacgcagaatgtgttccagttctcttcaccgggcattacccggtttatccaggatgtacagccggagtgtatcgaggacctgatcgccgtcaatgccctgtaccgccccgccacgctcgacatcggcgccaccgatgattatgtccgtttcaggcgtggcgaggtggccccggtctataactacggctgttatgaagcgacgaagaacactttcggaatcatggtctaccaggagcagttcatgtccgtcgcccatacgctcgggggattcgacctcgggaagaccgacctcctgcgcaaggccataggaaagaagaaagccgacctgatggccacgctgaaggcggatttcattgccggagccgtcgggaacggatgcccggactatgaggcggaggaaatctggcacaagatagaggtggccgggaaatattcgttcaaccgctcccatgccgcggcatacgcccttacagcctattgcggggcatggctcaaggccaattacccgtcggcgttctataccgtggcattgcaatgggcggacgacaaggagattccttcgctgatggcggagatggaacgctgctcgccggccaagatcgtgccgccggacatcaaccgctccgggacggagttcttcaccgactatgccaccgatgaaatcttctggtcgcttacccgaatcaagcaggtcggcctcaggacagtggaatacatcgtcacggaacgcgaccggggcggggcatatacgggtatcgagaacttcatccaccgcatattccgttacaagctcaagaaatacagttactgggacgatcccgacaacgcggaagaggccgtgaaagtccccgtgaacgcccggcatgtcaagcacatgatccttgccggatgcttcgaccgcatcgaaaaagtcggggcggttaccgaacgctgcgcgctgctcgaacgcgccgcacgtgaactgggattctccctttccgaaaaggacttcccgcaggacatgcgcgggcggcatttcttctggtcgcagcagcagattgccgtgtcgggtatcggcagcatcgactaccgccgcatcttcgacaattcggaagccagcgggcaggtcaagggaaaagcctcctacctgaccctggacgaggtggcacgggacgagaatgacggcaggcgtgcggctgtctgcgccacggtggtggatgtagccgagcatacctacaaggacagggagacgggaagccggaagcgtttcgccaggctgacactctcccagaacaaccgcctggcggagtgcgtgtgctggaacgactattacatggagcaccgcaccgagatccagtcgcttaaggaccgggtggtcatcctcacggccgtcatccgttacagcgactacaacggctgcaatacattgcagacctataagaactcattgttattcatccaatcctgagaagatatggcaccacagactgaacagaaaatatatgtaggcatcgggctggatttcgagaccggagggctggactgccgtgaatgcgcctgcacgcagatcgccctgcaggccgtccgtttcgacacatggcaggtattcgaccgctaccaggcgtatatcgccccctacgggaaacaggacgcgggacttccccggcgcaaggtgttgcgtacccgccatgagcaggcgaaaggacaggaatatgtcccgatgaagtacgaacaggcggcattggactattccgccattaccatggagatgctgcgcacgcagggtatggacatgaagaaggtggccggagaagtcatcgccttcgccaaacgcgccaccctctcgaagggcaaccagtgcaagcccgtgctggtcggacagaacatcgccttcgacatcggattcctgcaacagctggtgaactatgccggactggccgccgagtttgaaaagaccttttccgggagcagggactattacggcaacttccagccgcactacatcgacacgcttgccttggggcggctggcttttgccgccgatccggaggtcacctcgtacaaactggaactggtagcctcaaggttgggcgtggaactggacgatgcccacgatgcggctgccgacgtgacggccacgctcgacatcctgggggtctatacctcccgtctgcgccagacggaagggacggcaaccgccatgcagaagaaagagaaaacccgtaaatatttcaagatatgagtatggacacgaataaggaagccccaggcattgaccgggaacggattcccgagaccatcacattccgcacggcggaccggatgacctacggggcgctgggctatgacgggaacgaactgatggcgttcatatcgggctacgacctggaaatcaagttcaacctgcggctcatcaactcgctggcggacgcggaggcgtgtgccgatgcgttggcccaggtattctatgacgcattaatggaacaattgttatgcaacgaaaaggcgggttttgtaaaacctccgggacacaaacccgctactctttcagaaaaggaaggaagaaacgatgtcagacaagatagcgaacacgcaggataggccggaagagaaaccgctcacggagcaggagctgcaattctgcaacctctatgtgaacggcgggctggagtatgccggacggccgaaaaaatgctttgtggaggtattcggtgaggatacggtgaagaatccgtacgcttcggccaattacctgatgaacaaaccgcatgtgctggcgcatatcaaggcgctgctctcctcggaacggttcgagatggagacgatggccgtgaagctgcaggtggccgagaccctcaaggccgtcatggacgagacggccacttcggactataccgaccgtttcggagtgccgctttcccctgcgccgctcagggccgtgtcggtcaatgccgccaaggcgctgatggatatcttccccatcaggcacaaggaggagaaccgcctgcgcatcgagggcagtgacggcaatgtcatcttcaatgtgatcgtaccccaaaaccctatgacagatggtgaaaaggaaacataaagtcaccagggaagaaattgcctggtggatatatctggtgataatggtcgcgctggtcatctacggattccgggacagcgcggcggctgaggttctgataagggccatcagggaggcattctcacttttaatggaataatgatatggaacaattcaaggaatttgtagtgaagtacttcaagattatcgtcgtggtactttcgttctcgctgacactgtacatacagcatgtgaacaacacggcccagattgcagaactggagaccaaatgtatcggtttggaagtggaaatcaagaaccagtatgaccgcatcaacgccatgaagctggacaagtccgtgttcgaggcgaccatgatgcagctcaacacggtgcagaatgacctgcacgagatccgggccgacatccgggagctgctgaaatgccagaacctgcataaataacccgatttttaaactgccggttatgacaaagaatacttatgtgaaaatcatcgcttctccggaactttcccgcatgaagcttggcggactggccggccggagagggctggtcgtggaggacctgtccggtgaagacaggaaaaacaagggcgggctggttctgttggaagaggcctacatggatgagtttgtctggttcattcccgaaaaatccgtgacatatgaataggctggacaaaacacttctgataaccgtgctgctgctcggcggcatcctctggttgcagcaccggtggacaatacgcctcacggaagaacgcgaccgtttccgcatgaacagcacagccctgctttccgatgtgaagcggatgcggaccgattcagcgacgatggccctcgatgccaaggcactgcggctgaccatagacgagtatgaggagttccgtgccgaggatgccgaaaccatcaggcggctcggcgtgaaaatcaggaatctcgaagcggcggcccggcatgaggtcgaggtgaaagcaccgatagacgccgccgtccgcgacacgctcattgtccgtgataccgtcccgctactgcggcagaaagtggagatggtcacgccgcatatacattttagcggactgattgaagagaaccgtctcaaaggtgacataaagatacccgtgacgcttaaccaggctgtatgggtggaatacaagggatggtggttctggaagagggtcaaagctatccgtcagaccatatccagcaacaacccgtatgtggaaatcaggtattcggaatatataaagatagacaaaaaatgatggtggactgcaagcgttggatagggtgtgttgattgaagcgacatttactccggaccgggatgtatctcaaatgatggtttcagatacatcccggtccggaatattttagcccgttgcctgatatggccatttataacgggcacgagtgggcctggtccagaacagtagtttggaaaaccatccaatccacagatttgacatccgccagacccattgtgccggtaaatcctgccatctgtacagctatacggttgtttccggcagcctgcgccgaacaggaaacattgcaacaattctgcattaccgatgacttatccggccatgtccggatattaaatgaagattggcgggaccggctttccgtttcatcaagcgcaccatttctatatctttccattccataacaggtagaggcatgcagtgcgcgcacctcttccgttccgtgcaataatgacattctttcatgtctccgccatatcgaagtaaagaaatgttaagcaaggtggattttctctcattttacgattgagaaacattattatagtaatatttttccggactacatccttgccagactgtttgccatattctttaatgacagaatatcaatcattgaaaattaagtaatatggcaacagtaaaagttaaattccgggcctcttccgtcgagatgaaggaaggctcgctctactatcaagtgattcacaaccgtctggtaagacaattgcataccggctacaggctttttccttcggaatgggatgccggcatttccgaggtcgtggtggcttccggcacagaagagggacgcaggaattacctgctctccatgaagaccgccatagcagacgacctgtcccggctccggagcgtcatcgcacggctcgaacgttccgacacgggatataccgccgacaaggtggtggaagtgttctcctctccggccgactgtggcggtttcctttcctttgcacgacaactcatacaggaactgaaaaagataggcaaaaggcgcacggccgaaacatatacgaccgccttgaacagttttttgcgtttccggggcgaacgggacctgctgttcgaggaagtggactccaacctgatggtggaatacgagacctttctgaaaggcatcaatgtctgcccgaactcctcctctttttacatgcgcaacctgcgcgccatctataaccgtgcggtggaaagggaactgaccgtgcagcgctatcccttcaaacatgtctatacgggcgtggacaaaacagtgaaacgtgccgtcccgctgaaagtaatccgccggatacgggatctggacctgacgctcagtcctgtgctggattatgcgagagatctgttcatgttttcattctacacccggggaatggcatttgtggatatggcttacctgaaaaagaaggatttgcagaacggagttctggtctatcgccgccagaagacgggacagcagctttttatcaagtgggagaaacccatgcaggagattgtcggcaagtacgatacgtccgcgactccttatctgctgccgatcatccgggatatggatacggatgcccgaaagcaatacaagaacgccgcccatcttgtcaatgacaaactgaaaaaaataggccggcagttagggcttgccataccgctgacaagctatgtcgcgcgccacgcctgggcttccatcgcaaagagcaagaacattccgatttccaccatcagcgaagcgatgggacacgattcggagaataccacgcgtatctaccttgcctcattagacacatcggtcgtggacaaggccaacagccttattctaaaatcactgtaatcgggagaaagatttgcataatacccgcacaccgtacggacagcaaaaaagccattcggaaaatggctatagaaactgaaaagttgtgcaatttaaaacatctctttttaagagaagtattttgcaagtgcaaagatacgcaaaaatcaaataagcgcttcacgattaacgaaatttattgtccgtcagaatgaaaaaacagatgagccgttaagcgggcatttgcgatttgtttagtaaaaattaccgttcaaaaaataaacagtagaaaaccaggtcttttcctgaacggtatttttcttaaaaagagacagacaggagacggaatgatttgacaggaatcatgcaaccgaaaaaatgttttgccaaacttcagagagcaaccattggagtttaaaaaacaagtcgttgaaatagtgcgggaaaatcccgccaaggcgataaactgttgagtatttgcccgtttctctccgaaagagaagtatttgacggtgcaaatatacgtattttattgattataacggcataaacagcttgttttttaagtctcaatccgagttctaaaccggttctacttcaatgaatgttaagcattcccagtcgctcgaaccgaacataatctgtttttcagccacttatcatcaatgttatacgctaccacttctctttcggagagaagtattggtttgggagttgacgtgccggttttccggcccgaatgagataacaagaataaggaaaatatgaaaaaattgatcttcggtgtttttcttgcggtttgttggtgcacgggcactgtcaaagcgcaggatatcgcagtaaagaccaatctattgtattggtcaagtaccacgcccaacttgagtctggaatttgggctgggcaaacgcacgaccctcgacctcacgggtgcctacaacccgtggacgctgaataaggacaagaacaagaaaatcaaacactggatggtaatgccggagttccgttactggctctgcgaacgctataacggccatttcttcggcctgcacagcggttacgcgttctacaacatcagtggcgtgagaatcccgttccaaagcaagtccacgaaggatcaccgttatcagggctgggctacgggtctcggattgtcgtatggctactcatggattttaggcaaacgctggaacctcgaagccacgatcggtctgggttacatctacacgcaatacgataagtacgagtgtgccacttgcggcaagttcaagggcaacaaggacaagcattatttcggcccgaccaaggcgggcatctccctgatatatataatcaaataacaagaaaatgactatgagacgcatatacatcctattattgctgatattggcatgttgtcccatgatgttgcatgccgagaacgaaaccagttacttgcctctgatcgggattcgtcagggaggggtcgtcaagcagggccgcacggtagagctgacgatgtccgtcgatttgagcaaggcgaaaatccgtacgcagcacaccgtagcactgacacccgtactcatgtcggcggacagtagccgcgaggtgacctttcccccgatagtcatcgatggcaagacccgccacaaggtttacttgcgggcgcagcggctcgaaagcgtggagcttccccctttccacaatgattccgcacaggtaatcatacgccacagcagcaaggggcagcattacgattatgcggccaccgtgccctacgagcgttggatgctcgacgggcggatcaaaatccgcgaagaggtacacggctgcgtgaactgcgacaagggcaaggcggagcagtccttgtgggcgggcatacttcctgcctatgtccccgattacaagctcgacagcatagcccctgaacctgaacccgtgaaagtgcgtgccgaaacccgcaccgcccggctgcagttccggcaggacagttataatatattgcccggattcaagaacaaccgtgccgaactggacaccgtttccaactccatcgagctggtaaagaaaaataccgacgtcaggattatcggtatctacatcaccggttacgcttctcccgaaggcagcatggcgcacaatatggccttgtccgagaaccgcgccaaggcgctggccgactatatccgccgttacgacgctatcgctcccgagatgctccacgtggactggaagggtgaggactgggaaggtttcgtccgtgtgctcggcgacttcccgaacctgctgaaacgcgacgaggtatatgaaatcatcgaacgttaccccgacgaacgggatttctgcgagctgcaactccagaaactcgtgccgccgaccatttaccacaggctgctcaccgagatataccccgcgttgcgccgcaacgagtaccgcatcgagtacaacgtgcgcaactttaacctcgaagaggctcgccgcatggtcgatgagcgtcccgacctcctgagcctgtcggaaatgtacaaggtggccgattcctacgggaaaggcacgcccgggtacgacaaggtgatggccaccgccttacgctatttccccgcttcgccctccgcactcaatgagaatgccgtgaacgccatctcccgtgaggagtatgccaaggcggtggagctgctcgagaaatcggaagtcaccgcgcggtcggcagaactgctctccaccctcggtgtggcatacgccggggccggacaatacgacaaggcggaggatgtgttccgccgtgcttcggaggcaggctccgcgactgcccggcataacctcgaagaggtgcggcaggtcatcgaccagttgtagacaaaatccataagcgagaagttataaaaacctttttactaatttttaaataacaaaaagatgaaagtcaagagttttttattgacagctttagctgcttcaatgacgtttgttgcatgtgacaacaaagacgatgaaatgggacagttggacaacaccccaaagagtgtaagcattgacctgtctaatgtgattccagtaaccagaggcgccggtcaagaggtagaagacaactcaaaggtttctttgacagatttacaggtattctttacagacggaactaccctgtataaaggaaaaacaatcgaaggaactgaggcaacccactacttcagcaataaaagtaattttgacgaccgcgcagataaggtattccattttttacctgctgaggtgaacaaggtaatcgttgtaggtaacaacggtagtcaaataaatgcatctacttatgtagatttgaaaaaagacctgataatcgccgaacagcaaaatccgactgatctagacctttataaagaagtcgagttgacttctgtgtccggtcaagacgaggcaggacacccgctttacaaagcgaaggtagtgcttgaaccgcgtgtatccagaattgaaatcggtaaatttgagtatacagctcctactcaaggtcagcgtaagtacaagagtattgaagttcagcaggtcatgttgaacaactatttcgggaaagcagaccgtcagggaggaacagccagtgacatacagaactccgatattaaccccggttctatattcggccttttcgagacagctgctgatgcgtggtataacgatgaatttacctcaacagagagtcctgcaaccaccttgcctttggttacattggatgaaaatacacagtataagcattcctacgagaaaggcaatgtccgtcctgcataccacttctttcctaaagataataatattggaaatactaaccatcctcaagttcttgtaaaattgattggtacaacaaatgaaggaactaaggttcctctttacttggctaccagtacattcactcctgctgttacagcagatttcgccaagatttacgtcatgaactttgcatttagcgatgaggatttggataatcctcaaaaatgtgtggaggtaactgttgacgtcatgagctgggatgtagttcctgtcacacctgaattttaattgataacccgataggcagggcgaaagttccgccctgtctatcctttaacacttcaatcacatatatatgaaattgacgaatattgttttctgcctgacgttgctcgccggagccgccacatcctgcatccgtgaggatctggacgactgtctgagcacgaacacgctgttgctcagctacaagggcgacggcaccacggaaatattccccgacaagatctgccgggtggagatgttcgtattcgatgcagaaaatcgatgcgtcaattcgagtatcttaccagaggaacaggtcaaggaccgcacggctacgcttcccccgctcgctgccggagactaccggattgtctgcctggggaacacccaccacacgaaggtcgatggcatcgccacgggcgatttcggccggatgctctttgccgccggggattatttcgacgagaaacaggttgccggcaacgattcactttactatgctacgacctcttataccgtactgccttacagcggtgatgaagaggcaaaccagaccaaaaccatagagttcgccagctctcactacgatctgtcggtggaagtggccggagttcccgccccgggaacccgcgcaggctcgctgcctgtgcttgagatatgcggagtctcgccctgtaccgattttgagaatcgggcctgtggggaggcaaccgactatttgcttgaaaccgaatacgaagccggaaaagcgttgctcacggcccgtaccaacataatgcgtcacaagaaccacgagaacgtgaacatccgcctgagcgccgccccgaacggggaaccgctggccgaagtcaacctcgccaggttccttgccgacaatcctattatagactgttccaaacatgaagtgctcatcccgatacgcatcgagttcaagtcgggagaaatcacggtaagcgtacccgaatggtacatcgaacaagtgaaacctgagttttagaccgaaccgaaaagaatatgctgaatacaagaaaaatattatactgggcagttacagcagtgtgctgtggcctgttgccgtgcgggtgcgtcaaggaagatgccgcatcgctcggggaacggcacgatgtggcagtgcggctcaacgtagggacatgcgctgtcggcgaaaccgacggcacaccgaccggcgaagaatcggccattcactcgcttcgtgtctatgcctttgtaaaaggacaactggcgggccacgagttccggagcggagacatggagactccggctacattctggatggatctgacgatgacttccctgactaccgaaacggtagacttctacatcatcgcgaacgagaaggccatgagtaccccaggtgccgagaaaacctttacggaaaatactacggaagcggaactaaatgatttcacgtttaccacgctgacacgagatgtccaagcctacggacttccaatgttcggcaaggaatccaaaacaatcgacttctcgaaactttctaaccgtcagccgatcgaccccggccattcggggcatacaccgctggaagatgtcttgacgttccaactgaagcgtcccataggcaagttgggcgtgttcgcggccaaagaagcaggtgaggcaggagagctgtgtgtaacggacctgaccttgctggaagccggaacgcgtgcgtataattacctgatgccacagaccgacgaaacgctgaaactggcaggcgccactggtaccggcgagttttcactcgtcccctcttcagcaccggtaacgaagacgctggccacgaatatcacgcccgaagagaggcagaaccccgaaaactacacgcctgtactgggggctcctttttatcctttcgagaacccttggggcagcgattcgtggaacacaccgggtgatgagcatggaaacatcctcaaaatcggctacacgttcgacagcgagccgcgcgaaggtctggtctatatgccacgcattgaaaggaacaagtattatgcggtatgctgcctgatgcacaacagcggcaagataactgtcgcatacgatgtggccgactgggaggacggtggagattatcagttggagttcgattacccttcctatgaactgctgcaacctttcggtggagggaccgccccctacgcgcagccgacggtttactacaatggcggcgcatcatcgacagcgggaacctactcttttaggttcaccatcacaggtcctgtgagacaggaatggcagcccacgctgtttgatgccacagccgcagactatgaactgacggtatatcaaaacgtggatggtgtcaacacactcgtgacaccgccttatgtggcttccgatacagcgtacgaaatccgggtaagggcactgaaaggcgagaacgtggacaagcagttctcgttgggcatcgcctataccccgaagtgggatccttcgggaagctcgctcctgctgatcaacatgcagagcggagccacgaactggacaggaagcgagagcaccgagaagattgtaatcaaacaggttgacatacctacaaactaacaagcgatgagacggattatatacaatatgatgatttgttgtgcggcggcatggcttcttgccgcttgcagcaaagatgacgatctccccggcgggcagacaggaggtaacggcaacagcattatcctcgacatctcgtcgggagcgttgccggtgagtcgtgctaccgtaccggccgaaggggcggaggtcgcagtgagccatatcgacgtgctgattttcaacgataccgacgagaaaacgaaggtgtggagcgaccgggtgaacgcgtcagccaatgaaacgggacggattacactgcccgtaaaacggtcgtcttttacggaaaatgagaggtattgggtgtatctgatcgccaacagcacccacccggaaaaggattttgaaaacctcgcgaacctgaacgccttgaaggcgatgacgcaggaggacgagaacattcacctgacagggaaagacattgaaggtgtcccgggaacattcctcatggacggcatagcctatcccgaagggaacgatgaaccggcggttgctgctccggtcgtcctctacgacggctcgcaagggaatgacacgcggctggcggtcacgctgcgcagggcagcggcaaaagtcgtggtgaccatcaacaaaggccaagacgtgacttttgattccaaaggcataggttactacctgcgcaatatgccctataccacatcggtagtggcgggtgcggacggtgcggcaaagctgaggaataccgcccagacctccggcggctatcttgagtggacggcgaacaaaattaccgtaacggcttacatgtatgcccatgcttgggacaatggaagttccatggagcaggaagtgcgcctggtgatgaacattcccctgacttaccagaaggataccgacccgcaactgcgtcccgataactactaccagattcctgtctgtaacggcaaggccctgaaccgcaacacctgctacagggtaacggcaacggtcaatgcccccggagcggaaaatccctccacaccggtgcagttgacggatttgaaatataccgtggagaattggatagacgagacggtaaatgtcggaggcggggaccgcccgactttccttgtgctcaaccggtacgacctggaaatgcacaacaaggaggacgaccgcaccagcctgatcttcacctcctcgtcggaagtgacggcacagattacccgggtttactatatagacaagttcggaagggaacagaacttggagaaaagataccccgataatccaaacgataacgaatggggagtgagtaccggatacagatggcgcagccatggcaacatcctcattactcccgacaaggggctcaacggcaagctggatgtacacagcgacctccccaggaacaatacgatacgttatatcgaagtccgggtaacaaatgaggacggcaacgaacgtaccgtaaccattgagcagtatccgttggaatatatcacgaatatccaggggtggtactcgtaccgcgatgatttcaagaattcagatcctaacccgactacctatgaatatgtaggtgataaaattaccggaatcgcccttgccaccagaaatatctccagttggaacggagaatatagatacctaacggggacagatggtttatttggaggtcctccggacggattcttcgtttcaaaagtagcaaaattgaggaatgatggaagcggacagtctgatttatatgaatactattacacatcaaactcaaacagacttcgggaatcccgctatagcgaaattaacggcagaatgtacaccattgtattgacagggacatccagtgaatatactcttggccgtccacgtatggtccaggatacataccatccggaacttatggttacggatccgggacaggacaatgcccaattggtctcgccgtcattcatgataggttcctgtgtaggcgaattccaagttggaggaggaaacctgaagctggacgggagtgacaacagtgtccgcgttgcacgcgagcactgcgcgcattatgtagaaacgtataaagacccgaaaaccgataggacggttaccttggatgactggcgcctgcccacagaagccgaacttaaaatcatttttaaattccagggctcgaaagaccaggatgcagacgccatagactaccgcttgaacggacagtactattacagcgcaagcggaagattttataatgagaaatacaccgttagcggtaccggagtggcctgtgtacgcgatgcctacggtaaaaaggaataaacgtagaaacctgtcaaaaagaaacgaaatatgataaaggaaataatagacaagcttgtcgccctgcttgcggtatcggccctgctcgcttcgtgcagcgaaagcgagttgtggcagaatccgcagaccgaggcacgcgacggctacatcatgctgaatttcaagacggaaattcctgcgatgcaggaagtcgtcacccgtgcggtagaccctgacggtggcggagtgcaagatatgacacttttctgctttgacagttacgggcttttcatctctaccgtcaaggccggtgtcacggtgcagaagcccggcccgggggagatggagggcacattcaaggctgaggtgcccgaaaatacccggaccatccatttcctggccaaccagaatatggatgaattcaaggaggacagtttccgcaacaagtcggagtccgaggtcatggcagtgttggagggctcgtccggacgcatgatctattggggccgtttcgcctgcgatgcaggaaacgacagcaatatagccgaacagatggccacctcgggcaattccgtcaaactgatccgcaaccacgcgagaatctccgtcgacaacccggacaataacgggcatatcgtgattacgggctttgcggtctgcaacaccaacgctttcggaacggtggccccgcaccacccgaagaaaggctttgatttcacgtggccttccagcgacgaccccttcgtcacgcttcccgtgaacgatgccaagatgagcgatattacggacgtgacatccagcatgaaccagtatgtcttcgagtgcgagaacagtgccgatgcccctgtcagcgtaattcttcggggacatcttccggatcaggacgaagagaaatactaccgtgtcctgctggttgacgacaagggcgagcagctcctcgtgcgccggaaccaccattacaagcttcacatcgagggcgcgctatctttcggtcaggcctcctttgccgaggcgttggaagcggcagccacgaacaacgtatggatttccatttccgatgaagtgaacgaggtggaagatacggactatatcctgacagtagagaagacttttgtcgtactggacgagagctttacggaaaacggagacagctacacgctcaattataccattaaaggaaaaaatgacaaagccatcaccgaagccgatgccgcaacggtctcctggatagacaacggggtggcgacgcagacattcgagacgaaattcgaggtcgtgaacggtgtcggacagggacatatccagatacacctgcttcgtttggaaaataacgagaaactggaaggtacgctgcttgtcaagaagggacggctgcaacgcaaaatcaaggtcatcacgatcaggaagcagtctttcgtgcctgcatgggtcgggacggaaatatacggtaatttagggaacggtgccaacaagaacaaccgtgcccatgttacggccatgttcaccatacccgaaagctgtcccaaggagctgttcccgatgaatgtgtacctttccgttggcgatctggatatccgcaacgcttcgggcatggaactgcccgtggtgcgcgaggcggacaatgactggtacagcagcggtgaaatctcttccgtctatcaaggcaaagagccggattacaaatttgtctacacggccgatggtcccggcgtccagcgtgtctatttcgagaacatattgaatcaggaaaacggctacgagggcacgctctatatcgaagccgaatatttcgaaacgatgcggcgcaagttcaaatactccaccaatctcgtatccatcacggtgcagggactgaacaaatacgatgccgtaggctcgggcgtacaagatgaagtgatatactatcgtctggttccacagaaaaaaggagccaacgtgcagtttgacatgctgctggcagagaggtccgacaatgatcaagggacagggaacgacaatcctgccaatgcgcaaggcaaagacgaattcctgctctactcgcaatacctggattattacgaggacggtgaggaacccgatgccggagtgactgcattcgattgcaaattctatcccgatgaatcgaacaattggtggcagaccaacaatccccaaggtggccgtatgctgatgttcaaaccgagaactgaagttttgagcagcccgtcgcaaggtaccggaagatattccatctacatgaagaccaaccgtgcccggagcgccgaggtgatccacatcgcctccaacgacaaccggctcggaccggtattgccggaagatgcaaacgaggataatcccggtatatatggcggccgatcataccgcagtacgactttcgagctggccaactacaccccgttccggttcggagcccgcgtgaagtacggcaacaacgactggcagggagaggccgacgagcctgaccgcacggtagcatccggtgccataccggcagacataccggaaaaagtcaccccgttggaatggacatatcaacccgaccagcgggtggatatcggcatcgatgtgacgagctttgccggttttgacaacaagtcggtggatcctttcggccaagcgttcgaaatctatatcgacgcgcctatgctgaaaatcgatgccggccgtcttgcggaaaacagactggacggaaccaaactgaaagcgcatcccacgattcccgggcgttttgtctataccgtggatgccaagcgggagacggaacggcgatatggtacggatgatattgctaacacggacaatattgcctccagtcagcgtggggaacgcaagaccctgccgttccttgtgaatagcgtcgtaagtgccggggacatcgtgatttcgtccgatgaaagccgggtagtgtattattccaagactttccgtgtgtcgaaccaatcgattgccgggacgcttcaatataaaaataccgccggcgtggtgcaaaacataccgaaggatgctttcgtatccttcgagcgtacccgcaacggaagccgtatcgggtcggtaagcgtaacagccgacggccagtacgaacttcggcttcgcaaggaatatgagtttaactggtacacggacgaggtggaactgcattacacaggtgacggaggcatggtttatcatgcgacatacccgagcctgtccagcctgtttgccagtccgcacatcgtacttgaaccgtctgccggcgaatgagattttccgaaccggtatatgcaacggcaccggacgtttccacatccggcgcctttttaacaacataagatatgaagatgctgaatcatacttttttcgcctgtcttttgggcatgagtctcgtttcctgttcacatgcccaacagcagaaaaccaaggaattccgtctgcccgacgtgcctgtcacgctgacggcgcctgaagacagggcggcgtacttgtccctgcattactgggaccacttcgattttgccgatacgtcgctcatctcccgtcctgaaatcaccgagcaggcctttgtcgatttcctcggcatcctgccctataccgaccgggcacaggctgccatcgatactcttttccgccgcgccgcaaccggacaggagatgctgtatcacttcatcgggctgagtgacaagtacctctacgagcccaattcgcccatgcatgacgaggaactgcatatcctcgtattgcgggcactgctggacaacccctgcctgtccgatacggacaagatacgtccccgctacctgttggaaatagccatgaagaaccgtccgggagacgtggcggcggatttcaccgtcacttgccgggacggcaggcgcaggcagctctccggcataaaggccgactacgtgctggtttacttcaacgaccccgattgcgaggactgccgccgggtgaaggaattgctcaccctgtccccggttgtgaacgacctgttggagtccggccgtctgaaactcctctccgtgtgtgtggagggcaagacccccgcgtgggaaaaggcggaatttcccgccggttggatagatggttatgatgccgatcagcggcttacccgcgaacaggtgtacgacctcaaggcgatgcccaccctttacctgctcgatgcggaaaaacgggtgatactcaaggacgcttcgttcgagcaggtggaagaacggttgtcctgaaagatgcctcatgaaagcctatgaagacatccggaaaagacagtaaggagagcaaccgtttcaggggcatcaggccggagacggaggagaaataccgccgagcgatcgagatgtacgcttccacggagctttccggctgtgagatatgccgtatctgcgaagtgacagaatcgggtttccggtgttacctgaccaagtaccaccgtgaactcgtgctggcccgttacgctatactgtgcagcaaagaagaggccgggcagattaagttgggacagctccggggacagttgcccgctacccgtgtcaaatacaaggataccatcgaggcgtgcgggagcatggagcatatcggattgcacgtaaattcgggttggaaggcacgaatctgggcaggcagccgtgtacgcactaccccgagataatcgaatggcgcgagaaggtgcgcgattggctgggtatcggtgacgggctgccgcgcggcacgcgccgctcctgcaaggaatagtatgctgaggccgtcaggctcttgcagggtaactcgtatgtcacggtgccggaggttgccgactcctgcgggctttcctataccggactggaacagcacctgttgttctaccataaggatctggtgaagcggcgcatcaggatacgcaagaaggctctccgacggcagcggaaaggggaaatcaccggtcggggtaccgtgcacgccccctctccggagttggtggagaagtatgccgaagcggtgcatctgtatgccacgacacccatgtcggccgcacggatagccgggaagacgggagtgtcgaagaagggattctacgagcacctgcaaaggtggcatctggacctggtatgcaggcggaagaatatcccctacgaggaagggcggctagtggactggtctaaagtccggaaatacaaccccgcgacaaaggccaaatatgccgaagccatccgccggctgaaagaaagcgggctgccgacggcacaggtcgccgccgagttcgggctgcaacccgaagcgttccgcagctacctgaaggaacacgagccggaactgtatgcccggaagggaatggtcaggacggatacgggcggcgcggtgtcccgccgcagcatggagaaatacagcgaggccatgcacctgtacggcacgacaaccgaaagcgtgaagtcgttggccaggcggttcgggttcaacgactgctcgttcgggcagttcatcagaaggaatttccccgaactggtcgaaaagcacaacgaaatcgtccagaaaaaaggaaaacaaaataaataaccggctttcgtatgccgctccgttgcggaagataagctgtcatagacagtctgacaaaattcaattaggatacctactatcaaaatgatttgcaggattatccgattctgtcatttttcaatacactctctctaataatcatcaaggttagatggacattcatcgcattttttttctgtcttttaatcctaagtgttgcataatatcggataacgatttaggttcaacgcagctgacaatcttattcaatcgactatcaacttttggggaacccccaagcatcatggacattttttaatatccggttgcgataaatacagataaatactacatcttctctcaaaatactgttattggggacccagcattataccttgatttataaaaacaaggaatctatataccaatttactgtcaaccaactttcttccaacttcgccatactttctctataaacagatagagttaagttacttactatctgttggggaaaacaaaaattttttctctgtttatagaggaaataagcaattaaatgcgggtaaaagaaaacttgctccttatctacagaacgtagcccatttgaaacccgtttagacttacttagcatgaagtgacaaaaatttggcatgaaaacaagtatcctcgtcatgcgctgtaaagtggtacataatatatagtatgaaaacgtctaattattgggaagtgtatgaccgataagttcagactaacaataatgaagcaaaaaaggttttgttacaaataagtctgagtgtaagttatagagagattgttcgacaaaaattccgttctctccataagagaagtatttgaatataaaattggttgtaatcagctagtaaacaatatttgttttatttgcttggaagacgattcacttaacaactgttgagtaaaacctataacatctgtttgaaatgaggcactcggttgaaaattatatcatttttatattgttattttcagtgaattgtataattttgtatcccaaatacttctcttatggagagaagtagcagaagatggagccggaaacggcttcagagattttgtgcatgtgtgagataacggaatcttttatggtgtaaacatgaacagatatactgacatgggaagttattctccagcttttgaaaagaatgtttgtaactgcttgatatgtagtataatttacaatcttgcaggattagaagaattgtcctaaatccaaaatatggctacttcggaaggtgaaaaacagacatgctggtacgtgatgcgcgaccttaaacgggccaatgccaagttgcccgcatacaagcaactgttgaacgagcatttcgaggtgttcactcccatgaaagagcagttgagtgttcatggcggcaaacggactcgggaagaagttccctttatccaggatttgctttttgttcatgatacccaggaagctattgatccgtttgtggaaaagtatcccacgatacagtatcgtttccagaagggaggtggttacaaaaatccgatgactgtcgctgatgcggacatggagcggttcatacatgctgtaagtgtgtcgaaaaatccgaaatattatcttcctggcgaattgacaccctctatgtgcggacggcacatccgtattgtaggcggtcctttggacggttatgaaggaaaattgctgactgtacgcgggtcgaaaacgaaacgtctgttagtggagctgcccgagttcttttccgtaggggtggaagtcaatcccgaatatatcaggctattataaaataatgatatgtaagcccgactctattttggatgatatatggtccaaagttaaagcggtgtgcattgattatgacctgccggacgagctgcggatattaaaggttatgctccggaacaagatgagtactggtttctgttatctgttttgacaaatgcatctgtacagaacagcccggcgcatgttacaatgaggataaaacctgcatttctggctttgtaaaattgaatatacgctaattcccgacaacggatgaaacatttttgaaagtaatgaatggttacaattccggaactgagccttgctggatgccattgatggaactcatcgaaacatgcctgttcgacatcattcacacagaagatacaaccggacgattcattcgtctgtatggagcaggtgactattggcacgcattcgaagaatccgcctaccaattgagtcagctgttcgtgacacacgatgtaactgtactcaggcataaagtttacccatttcccgttttaatggtcagcatctcggatgacgaactccaggcttacggcaaaaatcacatcttcagaaagaaagtatcagggtacagggaacttgttgggataggaatctcgatgaagcggtacaaggaatggcacaaaaaagaggtgatgaaattctcttctcttccatgactttgcacaagtaaagaacaaattctgacataatatgattttttggatagttaattgcagtattgcattcctgatctgtgtgttctgtgcgggtatcatcattccccagattttgttgatcgctttccgcaagcggttattcgaccttcccgacgaacggaagattcatcattgtgccgtgccccggttgggcggcatcgcattcaagccggtagtgtttttcaccgtagccttgttgctggggatcaatatggttatggggcattcggagatgttgtccgaaatcgagaacgatgttcggcccttggctttcgccttctgctccatcatggttctgtatctggttggcatggccgatgacttgatcggcatccgttatcgagccaagttcgttatccagattctgtgcggcatgatgcttatcgccggtggtatatatatcgataacctgtacggcattctaggcattcattcggttccattatggctggggtatcctctgaccattctgttcgtggtcttcatcatcaatgccatcaacctgatcgatggcattgacggactggcttccgggctatgcagtattgcctgtttgctttatgggttcttttcttatgtttcaccagtatatatatgccatgctggcgttcgccacattaggggtgttagtgccgttcttttattacaatgttttcgggaatgccgagcacggaaaaaagattttcatgggtgacacaggcagcctgaccgttggcatgatgctctgtcttctcagtctcaagttgactatgtgtgggacagatgataatacggtacatataaatccgatggtgctggcattctccccgctgctgattccttgctgtgatgtggtccgggtttatctgcatcgggtacgcaacggaaagaacccgttcttgccggataagaaccatatccaccataaactacttgctgtcggaatgcagcagcgaagtgtcatgattatcgtcatatccgtatcgaccgtattcatactgtttaatattcttctctccctttatctgaatgtaaactggatcgtactagtcgatatcctgatatggactttcaccaatatccgactgacgaaacgtatcggacagcttcagtcgagacaggcaaccaacaaataaaaatcaatgaaatatgaaaatcagatacattttactcttattgaccgtggcttccctgctaggatcatgtgccgcgccgaaagtcgcttattttacggacctgaaaccgggtatggcagagcaggttcttaatccattggaaatcagggtacgtcccgaagacaagatttccatattggtcaacagcaaagaccctttgttgatggaccttttcaaccttccgattatatcccgacaaatcggtataagatcagaagcatccaacaatcaaggaatgtcaggatacacgataaacaaggatggaaatatcgattttcccgtgctggggcatatccatgtggcgggaatgacacgcgaggagattgccttgtgcataaaagaagagttgatctcgaaaaacctcgtaaaagatccggtagtaacagtggaattcatgaacctgaccgtttccgtgttgggtgaggtcgccaaccccggacgtttcaatatcgacaaggacaggctgacgctcctggacgctttaagcatggccggggaccttaccgtctacgggaaacgggagaacgtgctggtacagcgggaggaaaacggcaaaaagaccctgtaccgggtcaatctgaattcgggatatgacctttatgcttctcccgtgtactacctgcaacagaacgatattgtttatgtcgaacctaactcggtcagggcaagacaatcgacagtcaatgggaacaacgtgcggtctacctctttttggttatcgttggcctcgctgctgaccaccattaccgtgttgatcgtgaaataaatatagaatctgatatggccgtaaatcaaaagaatacaaaaccgggacagccggatgatttcctgcggatacaggatctgttgtacctgtgcctcgcgaggtggaagtggttcgtcctgtctttggcgataacgacaggtgttgctgctgtctatctgctgtgtacccctgccgtatatacacgcactgcttcggtgttgatcaaggaggattccaaaggcaagtcggtttccccggatctggaatccttttcggagtttgggttgttccagtccagcaccaatgtaaataacgaactcatcacctttcagtcgccggctttaatgaccgaggtagttaaacgatttcgtttggatatgaattacttcgttccggggaaattccaccgtcaggtggcctatggactgacattaccagtggatgtaacgataagtgactttcctgaaaacgaatcggctgggtttacattggaagtacagccagacagcacattactcttatccgactttacacgtaacgggacggagctcgacggaaaggatataaagggccgcttgctcgactccatcactacgccattagggaaaatcattatccatgcaacccccaattatgtgaaaggcgagacatacacattgtatgtaggtaaatccagtttgtatgatgctgtaaactcctgctcgtccaatctgtccgtttcattgaataatgagaaagcgtcagttatcgacctgtcattcagggataattctgtacaacgggcggaggatgtattgagcatgttgatttccgtttataatgagaactgggtgaaggacaagaaccagatcgctatcagcacctcgatgttcatcaacgagcgtttgggcgtaatcgaacaggaactgggcaacgtggacgaggacatttcatcctacaagtccgaacatctgttacccgacgtgcaggcggcttcgagcatgtatatggcgcagagcagccagacgaatgcgcagattctggctttgaacaaccagctctacatgacccgctacatccggaactatttgtccaatgacgccaaccgtacccaactgcttccggccaattccggcattgaaagcgccaatattgaatcgcagattgccgaatacaacaaacaactgttgcagcgcaacagcctggttgcgaacagtagtacggaaaatccgctggtcgttgatatggatcaggccctggcatccatgcgtggggcgataatcaggtctatcgacaatcagatagtaaccttgaattcgcagataaaaagtttgcggcagacggagcaacagacaacatcacgtatagcagctaaccctacacaagccaaatacctgctctcggtggaacgccagcagaaggtaaaggaggctctttatttgttcttactgcaaaagcgtgaggagaacgaactctcacaggcatttacggcctacaatacccgtattgttgccccgccccacggtagcatgttgccgatgtcacccgtgcgcaaaaacatcttaatggtcgcgtgtgctttgggactgcttattccggtagtcattatctttatatgtgagaacatgaatacccgtgtacggggaagaaaagatctggaaagcgtaaccgtaccgttcatcggtgaaattccgctgttcacaagaaagaagaaaggaatattcagaaagaaaccacaggaagtcagggccattgttgtcaaggagggcagccgtgacatcatcaacgaggcattccgtgtattgcgtaccaacttggagttcatgactggcaaggataaggcatcgaatgtcatcatcgtgacctcgttcaatccgggcagcggcaagtcgttcctgaccatgaatatcgccgtgagctttgccattaaagggaagaaagtgttggtaatcgacggtgacctgcgtcacggctctgcgtcatcctatatcgactctcctaccaaggggttgagcgactatcttggcggcaggattgacaatctcaatgaaataattgtcaccaatccgaaacagaaatatctggacatccttcctgtcggcaccatacctcccaaccccaccgaactgttgttcgacgaccggctgaaacaggtaatagataccgtaagggaacaatacgaatatgtgctgattgactgtccgcccatcgaactggtggccgacacgcagataatcgagaagctggctgaccgtactattttcgtggttcgtgcaggattgcttgaactgagtatgcttgctgaactggagaaaatctacggggagaaaaaatacaagaacatgtccctgatcctgaatggaaccgagggaagcggtggtcgctacggataccgttatggctatcggtatggttatcactatggttacggttcggaatatcactatggttccgatgaaaaatatatagagtaaatcgttgattatcaagcaattaaatacggagtaagaatgtaaatttgatttccctattgtttcactaaaaatcacaactatggcacagaacgattttacagaagacaaagcgaccttattcggtgcgggtatggttactgtaggtgtatttggtaaaacagcattgattaccaaaggagtcggagtggttgccgcaacaaaagccggagtattggctggtggatttatctgtcctcctgcggctatctgtatcggtttagcttgtgttggggccgggttgataaatcatttcggcaagcgaaactggtggtgaagtttatcaccgggacaatcaattcattcccggattccgcatatatgtcatgtggaatcgggaatgattaaaaagttttatgtcattatatgtggttttttaaaaaaagggaaaaacaaaatataataaagctaatcggttttacagactatcattcgcatattcttccgggcgtggatgacggtgtacaaacgatggacgaatctttggaaattctacgtttgtatgaggagcaagggatcaaatccgtatggctcacaccgcacatcatggaagacattcccaatacgactgcccatcttcgcgaccgttttgcagaattgcaggctgcttacacaggtggcgtacaactgcaccttgcagcggaaaacatgcttgacaatctctttgaggaacggctgggaaagaatgacctgctacctttaggcgagaatggcgaccacctgctggtggaaacctcttatttcagtcctccgatgggcttgaaaaatatcctgcttcgcatcaaatctaaaggataccaccctgttctcgcccatccggagcgttatgcttatatggatgaatcggattaccgacagctaaaagacatgggtgtgaaattccagattaatcttccatcaatagcgggtatgtatggcaaccggattaagaaaaaggccatgtttcttatgagagaacaggctattgcttatatagggacagatattcacagttacagtatatttcaaaagttcatttgtacaagcgttacaagaaacgtacaaaaactgcttgatttatagtcaagattattgcggctatggatagccaagctataacaaaaattcctattaataaacaacaagatgacaagcggagaaaaggctctttatcattccattatagagcagttaaaagataaggaactttccgatagccaaaaagacaattttgtgaaaaagctggatgaactgttcaaaagtatgaatgaccaatcaaaagaatttcaattaaactcaattttatgaaagcatgttttatgggcttgggctatatcggattgcctacagccattatcgcagcaaagcacggagtacaggtaacgggtgttgacatcaaccccaaagttgtagagctgaccaatcaaggtaagctccacatcattgaaccggggatggaagaaatgctgcaagaagttgtgaaaaacgggacattgcacgcaagcacgaagccggagacaagtgacgcttactttatggttgttcccaccccgttcaaaggtaatcatgagcctgatatttcgtatgtagaggcggcaactcgtgctgtacttccttttctcaaggaaggtgacttatatgtaattgaaagcacatcacccgttggtacgactgataaaatgcgtgacttaattttcgctgagcgtcctgaattggaaggtaaaatttatatcgcctattgccccgagcgtgtacttccgggcaatgtgatttatgagttggtacataacgaccgtgtcattggcggtatgaacgaagaaagtacaacaaaagcaatcgagttctactcgcagttcgtacaggggacgctgcatcggactaattgcaagaccgctgaaatgtgcaaactgactgagaacagcagtcgtgacgtgcagatagcttttgccaatgaactttcattgatttgcgacaaggcagggattaatgtttgggaacttatcaggcttgccaacaaacatccgcgcgtaaatatcctgcaacctggctgtggagtcggaggtcattgtattgctatcgatccatatttcattacagcggattttccggttgaaagtcgcataatttctacagcacgcgaaatcaacaattataaatcgttctattgtgctgaaaaagtaaagaacgccatgtttgaatttgaactgaaaaatcactgtaagcctgtggtagcaatgatggggttggcattcaaaccggacattgacgatttgcgtgaatctccagcaaaatatatcacaactaaagtaatgcaaggatgtaataatgccaacattttagtggtagagccaaatgtgaaagaacataacgtgttcaagttgacagactataaagaggcttatgacaaagccgatattgttgtgttccttacagcccatacacctttcaaagaactaccgtggaaagatgataaagtgatacttgatttctgtggaatatttaagcaatagaggtagacaatcattaagtttaccaagacttaccctcccaataaacgtacacatatactgattgcagatttacagaaaatctattgctttaagaagatgacattaagccaagttttcaaatcaagattgttgtcaaatatttggaatcagtttctcctttatggtttcagtagcattataccaattctactaattccatatttgttgaacgttataggagtagaaaaatacggtcttgtaaattttgccattatatttagcttttactttcagatattcaatgagttcggtttcgatttatctaatgtcaggcatgtcgtcaataatagagacaatcaagaaaaattgggaaggatagtttcttctattctgcaatgtaagttttttctcatactctgttctctatttgtttatattttagttgtagggttgattccttcactaaggaatgaactcacgctttatatattagcctttattcgtttgataggggttgtcattgctccctattggcttttccgttcaatggaggacattaaatatataacacgtatcagcgtgccaataaagctattatgtatattgcctatttttttaatcgttaagtctactgatgattatgcattggtgatgttgtgctatgctcttgaaacatttgtttcaggtattgtcgctttattcattgcccaaaaaagatacgggatcaaacttcaaatagtctcggcacaagaagtgaaattttatcttaaggatagtattccgtttttctcatcaacttttttgatgagagcctataaaacaatgaataccttagtgcttggctttattcttggagattttgcagtcggattatatacagctgcggaaaaacttcataatgcgtattcatcatttgtttctccgcttttatctcagatattttacccatatttcacaaggataaaaaatatgggtagagcgactaagatggtattgcttttatgtattgccaatacaatcgctttagcttgtatatatttcttatcaccgtatcttataccgatttttattaagactgaaacagcaagtataaccacgtatttcaacctattcttgcttttattggcgattagtgtgccagctgacatgttcggtttcccttatttgggcgtacttggaaaaatcaatgaggtaaatatgacaaccatttattctgcaatcatatacatcattgttgtccttgtcttgattcttactcacagtattagcataggaagtgttatttgggctttgattatagcgaacgtgggatgtttggttttgcgcctatatttagccaataaagtaagagttggtaatgttgataaacaataggatatacaatatagatactaattctcgacattgggctatttctttagccttaattgtaatcttgtctgtaataatgacatttattccttttgtaggactgtgtttgtcattaatgtttttcagacaaaggtttgcccccattctatttattatcttttctttctattttggttggttttatgagccacaaatggatttgttggttcattatgagcattttcatcgtattgccgacaaatcattggttgagcaatggatggactctggaacatcaaaatatggcaaagaaatatatcctgtattatttaaatatttcattggtttaattgctgataaccggaattttttctctgcttgtgcgtgtgtggtatatacttctctatttatatttggagtcgtaaaaccactccagccattatatatgcagaaaatgtcaattcctgcatggctactcttcctgggagtgatttttactgtagaatactattggtttctcggttttcgcttttggagcggagcatttgtttttactggcttctatttgagataccttaattcaggagccgttaagtacctttggttatctgcgttatgtatttgttttcactattcactactcgccttatgtgtcgcggctgtattaaacctactcttgcgatataggtttaaagtgtactatttaattcttatcgtatcattcatcgttcgctttgcgaaaatcgcgtttgtcactaatatcgcacaatttggcatatttgaaaactacgtcaaagagagcgttaggaatcaaaatatcatacagtctgttggaaagtatgcagaggaaatacgcgagtatggtaatcagttctatttgcttcgtgaaacaattgccgttttcggtgtcttggctgtgatctatatactatataaaaaaatagggaaagaattttgggagcagaatgtcaaattctgggggttctgtattctcctattgtcttttgccaatttcggatatgtcagtttgactttttatgatagattcttcaaacttgccgtgctattcttatatgtttttacatatatgtgggttatggatattcaatccaaattgagttttaagtcccagctactaataactatggttacaattataccggtattgtatttcattgttacaccattagttgaacagaggcacatgttgttccaactaaacttatggtttagtaatctatgttcatgatgaaaaattttgtaatctgaatttctcatcgtgctgatgtatggtctatggatagctaccaatacgaacaaccaaaaaggcataacatcagaaaacgaaaatagattaaccgttgatgttcaatgttcttaattattttaatcatatcaattgaaacactaacaatgagggtattaataactgttcccactaaatccggatatggaggagtaactaattattatttagggattaaagagtattggaaagaaaatattgaatatttttatttcggtcgtaagccttggcgtaatatattttatccatttttaattatccgttttataatccgattgatttgctttaaacctgatatagtactacttaacccatcgcttggagataaagccttaaaacgagattttatatatttaaacatttgccgatttttcagaaagaaaacatccgtatttattcatggtttcaatttcgagtatgctaaaaatgcagattggaaatggataagtgccaatttgaataaggccttgtgtatttttgtgttatcccaagatttcaagaatgaattgataaggagggggataaaatctgatatacatctaacttcgacaaaagtacccgattattttatttcaggttttgacctttcgatgagacaaggaaaagccgaaaacattatgtatagcgggcgaatagaaaaggccaagggtgtatatgaaacagtcgatacattttcaatacttaagtcacaatacaaggatctgacattgacctttgtcggtgatggctcagaacttcctatgttgaaacaatatgttgagaataagaaaataaaggatgtccgttttactggagagttacgtggggaagattttaaaaaggaatacattaacgccgatatgtatttgtttctaagttatacggaaggtatgccaactgtggttttggaagcaatgattttcggactccctatttttaccagaaaagtgggtggcctaatagatttctttgaaaatggaaagatgggatatatatcaagttcgttagatccggcagtttttgcagaagcaatgaaaccatatatcgagaatcctgctaaaatgaggagtgtatcaatatataattccgaatatgcgaaaacccattttgttgcatccgttgttgtccgaaaatttgaaaatacactaaagaaatatattgagctatgaatattctgagaatcaagaagctaatatttttacacctccaacatctacccatgaaatcaagggcatggagaccattagtttgcaaatggggtggagtgcagataatcagccccaaaagaacgtttatcggtgagggcgtcatatttgacacaaattatccacaagatatttttatcgaagaaggtgttcgtttgacatcgggggtgaaaatagtaacacatttcatgaatcctaatactggaagttacgacagggggaaggttcatatctgcaaaggcgcctatctcggaatgaatactttggtggtaaaacctgtaacaattggagagcgagctataattggagcaggttctgttgtgaccaaagatataccagccaatgaagtttgggcaggaaatcccgcaaaatttataagaaaacggtaggattaattcatatggacattatatcattctatagggtagaacgttggctatttgaacgccatattccggttttgcccaaaatcgtacaactattgatttttctcattttcaattcaaaaataaccgctgattcaaaaataggaaaagggtcatactgtgtgtgcaaagggattagcactgtcttaataccgggaacagaaatcggagaaaattgcgtattaggattgcgattttctactgtacggcagtttccatataaagaagttccttgtctaaagaataatgtttgggtgggacctaatgttattattgctggccctgttgtaatagaagatgatgtggtaatcgctggaaattcatttgtcaaccgaagtgttcccaaaggtgctattgtagcaggatgtccggcaaagattattggctggagaaagaatcttgattatgcgattgagacaaacccaaagtataaagatggccgtatgccattcttgacaaaatgaataacaccaatgaatgatattgcagatgctttttataagctaaaaatttattgtgagactgaacatttcaagggttgggatccgtatgatggtctcaactctaaaatttttcaggcaattccgctgctgaaaaagtctgtattgtgcagattgatggtcatacaaggtttcaagcgttgccctttcaatatgagacggatggctttcgttccgaaagagtataacgcaaaaggtatcgggctgttcttgtccggatattgcaatctgtataaagttgtggaaaatcatccgcaattatccgaaaaaatgggaacgttggagatgataaaggctcggattgaagaattggcagagttgcttatatccttacaatctaaaggctacagcggtgcttgctgggggtataacttcgattggcaggcacgccgtctgtttctttttcccaaattcacgcccacagtagttgctacaaatttctgtgccacggcactgatgcaggcatatgaaataactaggaacaaacactatttggagattgcattaagtgcagcggattttgtaataaaagatttgcatcgcacgccgtataatggtggctttctcttttcttatagtccgttagagggtaatgacactgtgttcaatgcttcgctgctcggttctcgattgttgagttattgtttttattatacacaacaggaggaatacaaaagactagcggagctatccattaaagcctgttgttccgggcaacgggaagacggggcttgggtatatggaatgctccccgtacagaattgggtagacagctttcatacaggatataatttagatgcgctgatcgcttatcaagagttgacagaggatcatgctttcaatggttacatcgaaaaaggtttcgactactatgtcaatcattttttcgaagcggacggaactcctaaatattatgataaccgaatgtatcctattgacatccattgtccagggcagctattgataacattgacccgcctacataagatgaaaaaatatgaggaacttgccaaaaaagtattgcaatggacaatccgaaatatgcaagataaaaaggggtatttctactaccaattaaaacctggcatcagttctaaaatctcgtatatgcgatggagtaatgcatttatgtttaatgcaatgtcgcattatttactcgcaatataaaatttccaacataaatgaataaagtttctttaaacggagtcgaaatatatccgttcgattccgaacagtctttgttgtcttttgtaaacgataataagggcatattagtagccataaatgctgagaaaattttacatgctacagatcagacacgaggaattatcaatcggaacatagggtattgcgatggagccggcgcacaaatggctctcaaacaaaaaggttttgaaaatgcgtgtaaaattcccggttgtgagttgtggctcaaaattgtagctcaattttatagagaaaagactttttatttgataggtggtaaacctcaaatcatagaagaaactgtgtctaaactgcgtaaagaatatgcagggattcacattatcggttatcgggatggatatatcaaggcaaacgaggaacgggaaagacttataaaagacataaccgaaaaaagacctgatgtggtatttgtggctatggggtctcctaaacaggaattactgatggaagaaatacagcatagacacaaagccatctttcaaggattaggcggcagcttcgatgtatatactggccatgtggaaagggctcctaaatggtgggtgaaccacaatcttgaatttgcctatcggttgctcaaagaaccgaaaagaataaaacggcaaattcacttgataaagtatgcctggtggctgataactaaaaaattatagaacaatgaagaaggtaatgctggtcttcgggactcgtccggaggccattaagatggctccgttggtgaaggagttccaaaaaaaatcagcagactttgaaacaatcgtctgcgtgacggggcagcatcgtgaaatgctcgatcaggtgttgcagatattcgatatcaagccgaattatgacttgaacatcatgaagcaggggcaagatctgtatgatgtaaccgcccgtgtgctgaccgggatgcgtgatgtgttgaacaaggcgaaacctgatgtggtattggtgcacggtgacacaaccacttctactgccgccgcactcgcagctttctatcagcagatccctgtaggtcatgtagaagcgggcctgcgtacccacaacatatacagcccttggccggaggagatgaacagacaaataacagggcgcattgccacctatcacttttctccgaccgctttaagcaagaaaaatctgttgacggaaggtgtgcaggaggacaagataaccgtaacagggaatacggtcatcgatgcccttcatatcgttgttgataaaataaagactgacggagctctacaacaagaacttgccggggtgctggaaaaagcgggttacgatacctcacggcttgctgatggcaagaaactcgttttgataaccggacaccgacgtgaaaatttcggagacggattcatcagcatgtgcacagccattaaggatctgacggcaaaatatccatatgtggactttgtctatccgatgcacttgaaccccaatgtccgcaaacctatccatgaagtattcggggagaatttgaatagtttgggaaatatgttctttatcgaaccattggaatatctgagtttcgtgttcctgatggaaaaagtgacccttgtccttaccgacagcggtggtattcaggaagaggctccggggttaggcaaaccggtactggtgatgcgtgacaccaccgaacgtccggaggcgttggatgcaggaacggtaaaattggtaggaaccgattataacaaaattgtctccgaggtatcgattttattggatgatgcatctgcttatgagcaaatgagtaaagccattaatccttacggtgacggaaaagcgtgtatgcgtataacgcaaacacttaatgttcggttgtaacttttgtattttcttgacacattcaccagaagaaatatgttagtaccgaaggtgaatgtcgtattgcaggcggacaaagacatcggcagcataacagaggcagacatttggctcaattgtatggacggcaacggtaacttcttgtctgtggctgcggaagaccataccggcgacggacattacattgccaccttgccgttagactacagcccggtagagcctttcatccaagttcacttgaatgaaatggtctatgattacctgtccattccgaatttcaaagcgggacaggaatgtcaaatctcgcttatactcggtacggacgggcttcgcacaccgggaataggagctgaaatcgacgactgggaagttgtggaaggagatgtcacattcgtaaaatgacaaaatataataaatgacgcctgctggttttgttatcattggcaggcgtttcactttttatccctcattcaggaatcccggcatttaccgagtgttccgcttgttctgcacgtctttttcccatttcgatgtgaaggatttaccacaaagggcttggagaagaagaaacacatagcagaactgaaaatccgacctagctaaaaagaaaaacagatttcttatttatgccttcagactccggacaaattaactctatagttttttgagcattccttcgttcgtattgggatttatggttatttttgtaattcaatcaataatatgacgataatggcaaagacataccaaaggactaaattacaagaagtcacgatcagaggatataaatccatagcctatgacagacctgtgaccttgaagctgggtgatgtcagcatcttgttgggtgccaacggtgcaggcaagagcaatatcatcagttttttccggatgctgagctacatgatgagcaagtcattcgggagatatgtggaaatatcgggcacgtctcatgccttgctgcattacggcattaaacggacaccggtcatgtccggagaactgaagtttgccgacagcaattccatggatgtttatggcttttcattggccaatgccactcccgacaggctgattatcacggaagagcggattacatggcatcgcaagggggagaaaaagccctatgagatagcactggaaccgaatttcaaggagtccgctctcgcagagtgtgaggatccggttgccaaaactattttccagatgctttcttactgcaaggtatatcagtttcacgattcatcgacagaggggccgctacgtcaggcttgtcccgtcgagacggccaattacctccagtcgcacggaaacaatctgccttctttcctgctgttcctgcgggagaactacaaggatgcctacaaccggattgttgactatgtccgtgacgtagttccccagttccaggacttctatctggagcccgtgggtggtatcatttctctccggtggatagataattctgccacggactatcgtttcaatgcctaccagttctccgacggatctatccgtttcattgccctggccgccttgcttctgcagcctgcccagacaatgcccaacgtcatcattttggatgaaccggaacttggcttgcatccctatgccatcagccagctggcagaaatgattaaggatgcgtccatacacgcacaggtcattattgccacgcagagcaaggatttggtcgatcatttcgacatcggcgatatctctgtggtggaaatgaacaaggaaacgcaggcaacctctgtcactcaccttgacgccaaagaatatcatctttggcttcagaactatacggtgagcgaactttgggacaaaaacatcataggaggacgtcccgtatgaaagcgaagattattcatgtcctttgtgagggacagacggaacagggatttgtggaggaagtgttgcgtccctacctgcaagcgcaaggtgtggcaggtgtaaaaagcatcctgattaccactaacaagaaaaagaatgcccgtggtggaatgctgagctatgctcaggcggtgacagacctagaactgttgcggaaaatgaagatggacggcgaatacgaacgtcatgttttcacaacgatgttcgacctctacgcattgccggatgattttcccggttatgaagcagccaaagcaatcggtgagccttacgcccgtgtcgcagcattggaaacggcgtttgctgaagcaatcaacgatagtcgtttcattccctatattcagctgcatgaatttgaagctctgctcttttgcggtattgactatctggcaaagcgttaccccggttgtgagaaacgctgcgaacagctgaaaaaagacctggagaaaaccagcaaccccgagctgataaacaatagtccggaaacggctccgagcaaacgtattatcaaggcgatagaaggagacaaaaaacagcattacaactacaataagccggctaccggcaaagatgttaccaaaagtgtcggcatggatgaacttcgtgcccggtgcagtcacttcaatgaatggatagaaaagttgatagactgctgattctgtaatcagataatatcaaggttctgacagacaggttcgagtgtttatctcaaaaatggaagagatggggattatacagaaagagggtgtaggaagaaatactcgctatataaagactgcgagtttcccatcttttaattgagaagacaatttttgctctgtccaaaaaacaagtttttggtcaaaaaacagcacaaataactgattatcaattattctttcaatgcccgaaaatctgtttttttgtacgaaagagttctttcacttttctatccctcattccggaattccggcatttaccagatattactaattaaaaaatttagataagtaacgagatgctagatttgattagttgctcgtaaggtataaggcatcgacattcttctgttatttagtcagttgaaaaaatgtaacaattatttctctgatacctaatactttttctatttacaccatccacggattcttatacggatcataatccgtctggaaagtagccagttgccagtcggtgacaggtttcttcgagtcatcgactttgcggggaatctgcggattaagccgtagtttggcggcatcattgagccatttcatgctatcctcgtaatcgcgcatgcggacaacactgacattattcggagcaatgagtttcgtgagttcgtagatggccagccggaccatgtgcttcttgagattgtagttgcgggggtcatgcaacgagaggttctgcccgacttgcggtgtgtccgcgttcacatccgtttccgggtaaaatacccgtccgtcataaacgacatattcgtgttccgacaactcataggcattgtatgatgaatcgtaatcggctatggctccccagcagtcggaaaccatcgggtcaagattgtaatcgaaaccttcaagcgtcatcaaagtatagaatgctccttcatactcgacgactgcccacagaggatactcgacaggctgccataacgaggcttccgcctcgatccaaccgccgaccaacgggatacggacatcatcgaacttgtacccgttttcattaagacaagtataaacaatgccgttataattcactttatctcccggataataggtgttgaactgggaataatttacaacttgtcccgcatcgacacggatatcagaactctcttcccaatagacaaccgttgccggcttgcgatagccgctgacggagcgtatcacctcatggatttgtccctcgaaatagacatgcacacccacgggataggtaatccgacggtcgtattcggcgatatattttccttttgcaagttccttttcaatctcgtagttctccgacaaatattccacgatactcatctccgtcgattcttccgcctggatgaatcgtgcatcattgccccgtgtgagttgtgccagggcttccggagtaattatcccaagatagtcgtcattattgagaaaccgtctgtacatatccttgttccgttattagtatgaaaatccttcctgaattaccgatgtggataccacatacccgttcccgtcgcctccgctcttgaacttgtaccagctgtcacgcaggtagtaacagagcaggtagtcaaggcagtcggacaagtgcccgtaccgttcatatttgacaccggttttcgggtcggtggtcttctgtttgctcttggtaccgtcctcgttacgaagctggtaaatcagatcctgggtaagtttgcgacatttgatatcgatttgtatctcccagccttcatagcccccgaatacctcgttgacgaactcgcaccgtgtagcctgcggaggctgcttgcgtaatagctttaccttcggtcgcaggattcctctgccgaaagtgtccgtgatgatggtatagttgttgatgccgtcctcgttggtggtggagcgttgtaacccggaagggtcaccggtcacatccactccgccgatatgcttgtcccggtaaagttttaagcgtactttccgtgccaacgcaggtgtgttgttctccttttcctccggcttgccgagtatctcttccagtatatagaccttcctgttttcatagtctatttgtgcggagagcaccgacatttggggggcaacattgaagtcccacaccgtgatgagcggcttggtcggatcgtatgctttttctttcagtccggtaacgagatgccgggagccgtcgaaactgttataaatcgccatatcgttggcttccacgaaatcccagttgccatagagcaggcgttcctttgtcgcctgatcccggatcttgttcagggccgcctcgtacacctgacggaaagcgatattcgggttgtcaaacacggaaaaaggtatatacgcttcaccctcgcggcagatgaccttgtctccgttttcgtcctgcacgaagcgggaacgcacccagttaatcgtcggattggtggtgagcagcattctcggagtcttgaatgtctcatgggttctccagcggagacgggagaacagcacttcgacggcccgttccgagatttccgacacctcgtccaccatggcgatggtgtattccgaagagccgaaacgctcgaagttggggtcgctggggatatccgccatctccttcatgatgatgaccgagtcattccagaatgtgagcgtgccttcgaggttgtttatcttgtagtttgtatcctctttcagtccccaatccttcagaatcgacttgatggtattccatgtcgattccttcaacgacttgagtgtcttacgggccaccaccgcacggatattctcgaaccggatacatgaagacaccagccaaacgctgccgatatacgattttccgccgccggccgctccgcctcccagtatcagctgcggcaggttctgcgacttgcaatgcctgcattggggcctgtactgagggttgccttgctggtcatagccgataaggatttgctcgatctccccgccacaatggggacaatagttcggttgcaacagtttccagagttcatactgccgtggggacggtttgaactcgatgcgcaggtttctgggtggtttgagcctgttgaccgccattagatttatacaatctgaatggttatgtccctttcggactcgagtatagcatacagtttttggaatgtagtacgggattccaaaacttttcccttgaccgtattctttcccacgatgatacagccggcggaatcgacttcggtattgccggaatggatcaggatgccgaggaaatgcggcacatcatgcagatatggcattttcttcttgtacctgggactgtactgaagagtgactttataagtcccggcaggaatggcagtcttggcatagaccttttccttgcaggtacaggaacggccgcgaggagtatccggacaggttgccggaagttccctcacggcatcttcgatggtattacagaaaaatttgccgtcgatggacaggtcacctatggtataggtctgacctttgaatttgcggttgagtgtcagcttcatacttcgatactatttgtatcgaaagagtagagacggacgccggctaatgtttattatatgtgtttgtaaaaggaggatatttcaggaaatgatgtatctttgtgaacggattgacagtatttaatcaagagttaatatgacaaaagcggatatcgtcagggaaatagcaacgcagaccggtctggagaagcaggtcgtgttacaagttgtcgaaggattcatggatagcgtaaagtcttccatgataaacggcgaggaggtttatcttcgcggcttcggcagtttcatcatcaagcaccgtgcggaaaagacagcacgcaacataagcaggaataccacggtgatagtgcctgcccacaatatcccggcattcaagccgtcaaaagcctttgcaggaaggatgaaatcagacaaataaggtgattatatgcaacaggagcgttattcagatgatcctgttactttatacagggcaacgaggttggcattgtccgattggaacaggaaacggccgttgcttaaaaggcattcgtggatggtgttgtcattaggatccgactccaataaagcccccgccttgttttcatcgataagaagcatttctatgccttgtacggtggcggcagttgcatcagcaggaattttcaaaagttcatccatcagattcatgtcgttcataatatctccgtatttggcttgagtcccgtcaagcattcaatgtaccaagaccaaaaagcgtgggacataacccgtagcaccgaggttctggtaaacctatccgcaaacaagttaagcccacgcaaaagcataggcgaaaactgtttgtcctgcggataagtgaaatttaccagatttcggtgcatgacaaaagctaacgctttccgtattttattatgtcgttctgccaatatggtttttatgccgcatctgcagaagaaccggcattatgtgataacgaccggacgtgtaaaggctatttcttggattcttccaaggaaaccttacgaaactctttcatcagtttttccaattccaacgaagtcttgcgggcacgggtacctgcggccttgttgcctttttcaatctgaagtgccgcatccgtggagaatgtagcatatacttcctgtatctttgaaaccaactctttcatataaatattatttaagttattgactacaaaggtagtgaaaataatcaagaataagagcgattctgtcaatataataaatatcacattggtaatcaatgacttttaacagccattataccgtatgatttatccatcagagaaattgtcaaggtgtttacaactttatggatatgtctggtcagaacatttcttccatctgccgcttgatttcttcccgctttgtattcttgtagtaatgcttatagatggtcaatgggctgttaccagccatctctgcaaccacatacggattattaccggcatctaccatcttcgatatgaaagagccacgggcggaataccatgtgatgttttctttaatgcgcaacatcttgcatgctttcgtcaaggtttgtgaaaggcgtgtggaaatttgcttgacacgtgtagtcttcttggaagtggtcgtgtgtttatgagtaaaaacaggaaatacataatttccataactttgcccacggtatttattcatgatggcttttgctttactgagtaattccggtttggctgttttgggaaacttgatacgttcatagacgatgcggtcttcctggaccaaatcccatgtcaggttacatacatcgacattcgccatacctccggtatagtagctgaacaggaacaaatcaagatgcaactgctcttttttcgtaaacaaggtacggtcaacatttgcgattttagctatgactgtttccggaactgctcttgaagtggtttccggccaattaatatcatcaccgagacagaggaagttatccatattcaccccgtacatctctttcttttctgcctgcctgcatacggcacggagcaaccttagtttgtgtgtaagtccggccttgttgccatttctgatacctctttctttaagccaaaacgcaaagtcaagaagaaactcttctgtaatatccgtaaagaaataagaggaaaaggctttttcatatttttcctttgtaaacgcctgcagttcacgcttgagatagacataccgtttagcattggtcgtgctgtcgacaatctgaccgttcttgatgcgtttcttgtttttgaatgtctcttcaagataatcgatcatctgctggacactctttactttgacctcgggtttggccgccttgatttcatcgaagcaatgtgatagctggacgggcgaccagttcctgccttccatctcccaggtatcggcgacatgcagatatttggttcgcaaatcgaaaagcagtttgttcttggtagtggcctccgcactccctacacggaaactctgagacttgacatcccagtcttttaatagccctgtgatgtttataaccttcggcacacgggcgtaaccggtcttgaagaaaattatctccagcttgaccatcttggtgtctttcgggttctgcttacccctgatgttaatcgtgtacatagactgataacgagttagttaatgacttattattaattcgcattagtaggaatcaattggtattaattaacctacatagaaacctacatgaaaagagtagtttccttagcgaaataatgtttatacggataaatccgtacttgtgtcatttactaactcgttatcaatcaactattttccctaatcacaaaagttgtgtccgaaaaaagggtgtgccttaacgtgccgctctttttcttgggaaaggttggggaaattaccgcatcggcacctcgatcagaagcaggctggctttcccgtccgtatggagggtgatgtcgttctgctcccaaatacccatgccgtcccggggggccagcttttcgttctcgaccgttacgtcgccttcgaggacgaagacgtaaagaccgtttccttgccggcgcatagcgtattcataggtatttctctctaggtcgagggtgtggaaccaggccgactgatgaatccaggccgtatgctcggaaccattgccttcgggagccacgagcgtgcgcagctcattggtgcgtgccggagcgagcgtgatctcctcgtagcgggtcggcagcccgtgtcgatccgggaagatccatatctggaggaatttgacaggacggttggggctgttgttgaattcgctgtgaatgattcccgttccggccgtcatcacttggatttccccggtgcgcagcaccgaagtatgccccatgctgtcctgatgtcgtagttcgccctcgagcgggatggaaacgatctccatgttgtcgtggggatgtgcgccgaaaccctctcctccggctacggtatcgtcgttgagtacgcgcaatgcgccgaaatggatgcgctcgggatcgtggtagtcagcaaaactgaacgtatggtagctgtcgagccaaccgtggtcggaatgacctcgtgtgccggctctgtggattacttttttcataatataatggattgattataagaaggtgttgcaaatagtgttccacgataccgcttgtagggcagggctgtccgaatataggttgccgaaggagtgatcgtgcggtcgagcgacaaagagaacggtccgggcgttagccccggaccgttctctttgtgaaaatagcttgtcggctcgtcgtcttatttgaggtgcggacctgcagctacgagtttcttgccttcggcgttgccggtgaacttctcgaagttcttgatgaaacgaccggccagatctgccgccttctcgtcccactccttcgcgttcttgtacgtgtcgcgcggatcgagaatcttgggatccacgcccggaagtgcagtcgggatcttgaaatcgaataccggcagcgtcttggtcggggccttgtcgatcgaaccgtccaggatggcgtcgatgatgccgcgcgtatctttgatcgagattcgtttgcccgtaccgttccagcccgtattgacgaggtaagccgtagcgcccgattgcttcatgcgttttaccaattcctcaccgtacttggtcggatgcagcgagaggaacgccgcaccgaagcaagccgagaaggtcggcgtcggctcggtgataccgcgctcggtaccggccaacttggcggtgaagcccgagaggaagtagtatttggtctgttccggcgtcaggatcgaaaccgggggcagtacgccgaaggcgtcggccgaaaggaagatcaccttcttggcagccggggccttcgatacgggcttcacgatattgtcgatgtggaagatcgggtacgatacgcgggtgttctccgtcacggacttgtccgcgaagtcgatcttacctttcttgtccaccgtaacgttctccagcagggcgttggggcggatcgcgttccagatatcgggctcgttctctttcgagaggttgatgactttggcatagcatccgccctcgaagttgaagacgccgtcgtcgtcccaaccgtgctcgtcgtcgccgatcagctcgcgcttcgggtcggtcgaaagggtggttttgcccgttcccgacagaccgaagaagatggcggtgttcttgccctccttgtcggtgttggccgagcagtgcatcgacgcgatgcccttcagcggcagcaggtagttcatgtaggagaacatacccttcttcatttcgccgccgtaccaggtgttgatgattacctgcattttttcggtgaggttgaacacgaccgccgtttccgagttgagtccgagttccttgtagttcttgactttggctttcgaggcgttcagcaccacgaaatcgggttcgccgtacttctccagctcctcgtccgtcgggcggatgaacatgtttttcacgaaatgcgcctgccaggcgacctccatgatgaagcggatcttcagacgggtgttctcgttggctccgcagaacgtgtccacgacgaagagcttcttgttcgacaactcttcgacagcgatctttttcagctccttccaggtcttcttcgtcaccggtttgttgtcgttcttgtattcgggcgaggtccaccaaatagtatctttggtggtttcgtccatgacgaagaacttgtctttcggggaacgacccgtgtaaacgccggtcatcacgttcacggcacccatttcggttacctgacccttttcataaccgcgcaggcccttgcgggtctcctcgcggtagagttcgtcgtacgacgggttgtagattacttccgtagtacccgtgatgccgtactgtttcaaattgattttagccataattattgatttaaattaatcctcttatttcacttgacagcggttgttcgtttatgaacgatgctcgcaaagttaaagatttttttcgaatgtgaaaatattaacagtaggtttatcgtttttcccggcgaatcattcggctgtcgatggcgtttacgatcaccgcgatcgcaccgtcgcccgttacgttggtcgccgtaccgaaactgtccatggcaatgtaggtggcgatcatcagtccgatcatattttcgtcgaacccgagcatcgactccagcaatccgatcgcagccatgatggctccgcccggtacgcccggtgcggcgatcatcgtaatgcccagcagcaggatgaaacccgagtaggtgcccatcgaaacgtccagtccggagagcatcatcaccgcgagcgagcaggcgacgatcttcatcatcgaacccgagaggtggatcgtggcgcagagcgggacgacgaatcccgccacttcggggcggacgccgattttgaccgtctgtgccagcgtcacggggatcgtggctgccgacgattgcgtaccgagggccgtcatgtaggcggtcatcatcgtgcggagcatcttcaacggattctgccttgccacgaggcctgcgatcgagaactggatcagcagcaggacgaccgtcatcacgaagataatcacgatcaacttgaggaaaatgcccagaatacccgatacctgccccgactgagtcatcgagaggaagatgccgaagatgtagaagggcagcagcgggatgatgaccttcgagatgacgcgctcgatgatgagtttgaaatcatccatcatgcccttgagcttgtcgctgtggatgtaagccatgcccagtcccagcacgaaggcgagaatgagggcggtcatcacgcccatcaacgggggcatttcgaccgtgaagaacggttgcaggggtgttgcggcggtttctcccggggcgctcatctccgtgccgcctagcagccggggtaagaccccgaggcttgtgaagaaagttccgaatcccgaaaacagggtaaaggcataggccagggctgcggtgattaccagcagccgtcctgccttgctgcccaggtcggcgatgcccggagccacgaggcccaggatcagcagcgggatgacgaagttcagaaaattgccgaaaatgttgttgaaggtcaatgcgattcgggtgaaccactcgggaacgaagaggccgaatacgatgcccagcgcgatagccaggagcactttgggaagtaagccgaatttatgcttcataaggtgtcgtttcattggttttcggttggacgattcatgcgtcggggccttgggccgatcgtgttcccgattcggaccgaattcgtttttcggaggtcccgttgcatgccgtttttctattaacgtataaaaagggagcaatatttgtgcaaagaagagaatattttctaattttgtcaatatgactgcactgtatagcgatattattttcggcccgatccattcccgcagattgggtctgtcattgggtgtcaatctgttacccactcaatcgaagttgtgtagcttcgattgcatttattgcgaatgcggctggaatgccgaacatccgggcgcccgccggttcaattcgcgcgaggacgtgcgtaccatgctcggagcgaccttgcgtcagatggtttccgaaggtacgcctcccgacgtgattactttcgccggtaacggcgagccgacgatgcaccccgatttcgaggcgatcatcgacgatacgatcgtcttgcgggacgaaatttgcccttcggcgcggatttcggtgttgagcaatgcgacgcagatcggccgcgagagcgtgcgccgggccttgcgccgggtcgataacaacatcctgaaactcgattccgctttcgacgatacggttcggctcatcaataacccgtgcgggacctattcggtggccgaggtggtgaagaacatgaaactgttcgacgggcagatgatcctgcagacgatgttcctgcggggcgagtgcgagggccgtacggtggacaacacgaccgagcgggaagtcgcggcctggttgaagctggtcgaagagatccggccccgtcaggtgatggtctattcgctcgaccgcgacactccgtgcaaaaccttgcagaaagtcccccgcgaagatttgcaggcgatcgctgcccgggtcgaggcgctgggaatcccctgctcggtggcgtaacgcaaagaagagcgacgggggaatttcaggccccttcggagaatttgtcgatcggacgttatttattgtctgtattatatagagggggcgaagattttatctgtgtcttgttacattgtttgctttgctctcgttggcacttttcgcatgtgacaagggcatccgggaggaagcgatcgatgccgaaaatatcttgggtaggtggcgtgcggtcgaggagccggattacgattgggatgattcggacgacgatggagcctgtgatgtgcccatgtatttggggattatgactttcgaacacgatggacggggtgtggccgataacggggagcattttgcctggagtctgacaggaagacggataactgtggattacggatttattccggcacggcttacggtgtcggaaatttgcgagcggcgaatggtgtggaaggttctcgcaacagaagcaggctcggtaaagtattacggacggatcgttttcgagcggttgtgattattccgtcgggaagaaaaataaagcgagaggaatcgattcctctcgctttattcgttgtcgcagtgtggtttatttctccagcacgacgctcactttttcgagcttcccgcccagcgggggcgccagcttcgaaaccgtacagcggatatggcggatttgcggaaaccgggcatagagggcatccatgatgttcatcgacacgcgttcgatcgtgcgctgggtgacgcgcatttgttcgcgtacggtttcgtaaaccaacaggtaattgaccgctttttccacgcagtcctcgctcgccacttcccccagctcggccgtgatctccagatcgaccgtgaagcggttgcccacttgctgttccaggtcgtaacagccgtggaaagcccggaactccatccggttcaaaacgatacggtattccatcttattcggcgattaccaggtagtagtttttcttgcctttctgtacgagcaggtatttcccgtcgatcaggtcgctttcggcgattgcacgcatggggtcggccaccttctccttgttgaggctcacgccgccggcctgtaccatcttgcggcattcgcccttcgaggggaagatatcgctccgctcggcgcacagctcgatgaagggcagcccgatcagttccgcacgggcgattttgtattgcggtaccccttcgaaaacctgcagcagggtctgttcgtcgagtttgcgaagcgcttcggaggtagccccgccgaagagaatgttcgatgcctcgaccgctttttcgtactcctcctgagagtggatcatcacggtaacctcctgcgccagccgtttttgcaggattcgcaggtgaggggctgcgtcgtgctcggcgatcaggtcgtcgatggtctgtttatcgagcaacgtgaagatcttgatgtaacgcttggcgtcctcgtcgctggtgttgagccagaactggtagaacttgtaaggcgacgtataacgcgggtcgagccatacgttgccgctctcggtcttgccgaacttggtgccgtcggctttggtaatcagcgggcaggtgagggcgaaagcctcgccgccggccttgcggcggatcagctccgtgccggtggtgatgttgccccactggtcggcgccgccgagctgcaatttgcaacctacggtttcgtacaggtgcaggaagtcgtaggcctgcacgagctggtaggtgaattcggtgaacgacatcccttcgccttcgccgttgaagcgtttctttaccgaatctttggccatcatgtagttcacggtaatcagcttgccgatgtcgcggatgaaatccaggaaggtgattcccttcatccagtcgtagttgttcaccagcatcgccgcgttgggagcgtccgattcgaaatcgagcagcttggcgagctgtttcttgatcgcctcctggttgtggcggagggtcttttcgtcgagcaggttgcgctcctgcgatttgccgctggggtcgccgatcatgcccgtcgcgccgcccaccagggcgatcggacggtgtccgcacatctggaagtgcttgaggatcattacactcaccaggtgtccgatgtgcagcgaatccgccgttgggtcgatgcccacgtaagctgtggacatctctttctgaagttgttcctgtgtgcccggcatgatcgagtgaatcataccgcgccattccaattcttcgacaaagttcttaattgccatttgtgtatttggttttactttattttatgctttattctacctccaggtcgagcgcccggcgcaactcggccagcagaggatttttttcggtcatatacttgacccggtcttcgagtttgatcgggcgggcggcccggatctcttcattgaccgtaacgtcgagctccagcataccctgcacgccggacgtttcggcgatgcggagcagcagttcggttttgttgcgcaggatctcttcgcgcagggcttccgacggaactgcgatacggatcacgtgtccctgaaattgcatccgttcgaacgccgcgacgaagcgcggacgcatctcgcggacgagcgtgaggattttttcacgggtcgtttcgagtttttcggcgctgagcgggtcgatgaccggctggggtgctgcggcatgcacggcggtttccgtatccggttccggggctgcgtcgtttatcagcgccgaaatggaaattcccgatgcgagtctggactgtacgggacggggacgcgccgtttgcggttgtgtcgaaaccggcgttgctgcggcctgcgttcgttccggggccggctgaatggacggcgtcggcattgcggatgtacgggcagcggccgatgtcgccggaggtgcgggatcggctgcggcttttgccgcaggcgttgcagccggagcggatgccgcgattccgggcgaagattctgccgccgcagccgtcggccgttggaccgtagccggttgaggagcgggcgcgggagccgtctgttgtgtcgattgcgaacgggccggtgcggattgcgcgggggcggtccgaaccagttccggcaacggaagatttacgggatcgacggggctattttttttttgaccgagaccggcgatcttcatcagtcccagttcgacgagcagccgttggttggacgattgcctgattttgccgtcgaggtccgtgagcagcgatatggcgccgaaaagaaattcgggagggcaggcggccgcctgcgtccggtatcgttccatcagcgtaccggtaaattccagcagccggagcgaaggctcgttgcgggccaccagcaggtcgcgcaggtggcgattgagtcccgccatgaaagtctggccggagaatccccgcgcgagcacgttgtcgaaagagagcagcgcctcgacatagttgcccgacaggagcgtttcggtcatgctgaagtaggtgtcgtagtccaatacgttgagcgtctgggccacctcctgatagcggagttcctgcccgcagaacgaaacggccttgtcgaacatcgacagggcgtcgcgcatgccgccgtcggctttctgtgcgatcaggttgagcgactcgtcgtcggcggtgattccctcctgcgaggcgatgtatttgaggtattccacggagtcctcgacgcggatgcggttgaagtcgtagatctggcagcgggagaggatcgtagggatgatcttgtgtttttcggtggtcgccaggatgaagatggcgtgtgcgggcggctcctcgagcgtcttgaggaaggcgttgaaggcggccgccgagagcatgtggacctcgtcgatgatgaagaccgagtagcgtcccacctgcgggatgatgcgcacctgttcgatgagcgagcggatgtcctcgaccgagttgttcgacgcggcgtctagctcgtggatgttgagcgagcgcccgtcgttgaagctgcggcacgattcgcacgtgttgcaggcttcggccccttcgggatgcagacagttgatcgccttggcgaagatacgggcgcaggtcgtcttgcccacgccgcgcggcccgcagaagaggtaggcgtgggccagttggccgcgttcgatcgcgttcttcagggtcgaggtaatgtgcttctgccccacgaccgaagagaaagtggcggggcggtatttgcgtgcgctgacgataaaatcactcatggcggaacaaagatagtgaaagccgggcgaaatcgggaaaatttattttcgaagatttccgaggcgcttcctatcttctgcaaagatagtgaaagccgggtgctgcgccaaatttatttgcactttgtcgggtggaatatgcggaatgaagcgcggtgtatcgttttcgaaaatccgttccccgtaccggcgatctgttcggtaattttcgcaggtgactcgcttcggtgcgagtatgcctcaagaataaagaaagacggaagccgaaactcccgtctttcgcagtgtgtcgccgcaggtcgccttactcttccatctgaaccgatccgtcgggcagcacattgaaggtgacttcgtaatactggaccgatttcttgccggcgctttcgacgatctccttgccgttttcggttatgttcatactgaactctgctttcacttcgccgaacgttttatttcggtcgaggaattcgttgcccgaaggaaccgtttcctgaatcaggtagtcgccgatgctcttgaacgtatagttttcggggatcatggctttggcctcttcgtactgtttgcggatggcttcgacgttgatcgaggccggagtcaggcctttgactttttcgaaatcgagtttccctcgcagcccgcctgcttcattcaggtcggagatgttgcctttgccgggaccggagagcgtgaaggtctgcgagaaacagtcgccggccttgtttaccatttcgacgaataaaactgtcaggttattctccagctcgtccgcctccatccagcggatttcatatattttccactcgtcgaagttgatattcttttcgagagtttctacgatgagttgcgttgcttcatcggaatccattttcggagcgctgatgcccaggttgttgcatgaagagatcagagtcgcgatgcagagcgatgccgtaatggcgaggataagttttttcattctgtctgattagataatttggttttgtcctgcaaaggtagccattttgtcattacgatatcgtccgggatatgacaaaatcggacaggacggcagaagttgcagacttggcagatattttgcgataggtaaaggcaaagaaatgaattaaaaataatataatgcactatgaacattaattctttaactattaaggcgcaagaggcgctgcaggctgcggtgtctcttgccagggagcagggcaatcaggccgtcgaaccgctgcatctgctcaatgtgctcgtgcgcgaggacgattcgctgtcggtatttctgctggggcgtgtcggcgtaaacgtgcggggactgcgcggcgaagtggagcgggccgtgcgggggctgccccatgtttcgggaggcggcgaacagttcttttcgcaggatacgaccaaagtaatccagcgtgccgtcgattttaccaagaatttcggggacaagtacgcttcggttgagcatctgctgctgggactgatcgccgagcggggtactgccgccgatttgctgaaaggcgccggggcgactgaaaaggagttgctcgaggcgattcgggtgttccgcaagggggcgaccgtcgattcgcagacggcgtcgcaggagttcgatgccctgggcaagtatgcgatcaatctgaacgagatggcccgcagcggcaagctcgatccggtcatcggccgcgacgaggagattcgccgtgtattgcagattctttcgcgccgtaccaaaaacaatccgatgctggtcggagaacccggtgtgggtaagacggccattgcagagggtatcgctcaccggatcgtgaacggggatgtgccggagaacctgcgctcgaaggtgatctattcgctcgacatgggcgccctgatcgccggggccaagtaccagggtgagttcgaggagcgtctgaaggccgtcgtgcaggaggtgaccgccagcgagggcgagatattgctcttcatcgacgaaattcatacgctggtcggagccggcaagtcgtcgggtgcgatggatgccgccaatattctcaaaccggccctggcgcgcggtgagctgcgtacgatcggtgctacgacgctcgacgagttccagaaatatttcgagcaggacaaggcgctcgagcgtcgttttcagaaagtcatggtcgatgaaccgacggccgaggatgcgatttcgatcctgcgcggactgaaggatcgttacgagaaccaccatcaggtgcggatcaaggacgaggcgatcgttgcggccgtcgagctttcgcagcgctacatcacctcccgtttcctgcccgataaggcgatcgacctgatcgacgaggcggcttcgaaactccgcctggagatgaactccgtgccggaggagatcgatgtgctggatcgccgggtacgtcagctcgagatcgagcgcgaggcgatccgccgcgagaacgacaaggagcgtgtcgagcaactgacccatgagatcgaggagctgggggccaaacgcgccgagcttcgtgccaagtgggaaggcgaacgggacgtgctgaagaagatccaggagaacaaggaccggatcgagcacctgaagatcgaggctcagcaggctgaacggcagggcgattacggccgtgtggccgagattcgttacggcaagattcaggaggccgagaagcagatcgcggctcttcaggacgaattccgtgcggcttcggctagcggggcgatgatcaaggaggaggtcgatgctgaggatgtggccgaggtggtatcccgctggacggggattcccgtttcgcgtatgctggcttccgagcgtgagaagctgctccacatggaggaggagttgcatcgccgcgtagtcggtcaggatttggccattgccgccgtgtcggatgccgtgcgccgttcgcgggccggactgaacgatccccgcaagccgatcggctcgttcatcttcctgggtacgacgggtgtaggtaagaccgagctggcgaaggcgctggccgagttcctcttcaacgacgacaacatgctgacccgtatcgacatgagcgagtaccaggagcgtcacagcgtgtcgcgtctggtcggtgcgcctccgggatatgtcggttacgacgagggcggacaactgaccgaggccgtgcggcgcaagccttattcggtcgtgctgctcgatgagatcgagaaggcgcatcccgacgtgttcaacatcctgttgcaggtgctcgacgacggacggcttaccgataacaaggggcgtacggtcgatttccgcaatacgattatcatcatgacctccaacatgggggcacaggttatccaggagaatttcgctccggctttcgacggcaataaaatttcgccggaagtggttgaaaagacgcgtctggaggtgatcgagcagttgaagatgcagctcaagcccgagttcctgaaccgtatcgacgagatcgtgatgttcgagccgctgacgcacgaagacatcgggcggatcgtcgatattcagatgaatatagtccgcaaactgttgaaagaaaacaacatcgagctcgactatacgaagaaggcgaaagagtggatcgcccgcataggttacgatccgttgtacggcgcacgtcccgtcaagcgtacgattcagcgttacgtggtgaacgatctgtcgaagcggattttggcgggcgatgtcaatcgcgagcatccgatcgtcatcgatgccgacgccgatggcctgaccttcaagaactaaaggcgaagcgcttttgtcaggtagatattcgtattcgtgaaaaatccccgctgtttttacagcggggatttttttatgggacaagtcggtttaacgcaccgaaaatccttcgtcggctttcatcggcatcggtttgtcgcggtagaagccgctttcgagcttgttgcggatggctttgaacgcctcgatcgtgaacttcacgtcgtcgagcgtgtgggctgccgtcgggatcaggcgcaggatgatttcgcccttcgggatcaccggatagaccactaccgagcagaagaggttgtgtttctcgcgcagatcgacgatcaggttggtcgcttcggggatgccgcctttcatatagacgggggttacgggcgactgggttacaccgatttcgaatccgttctccttcagtccgccttgcagggcacgggtgatttcccagagcttctcctggtattcggggtgcttgcggatcagatccagacgcttcagcgcgccgatcaccatcggcatcgggagtgacttggcgtagagctgcgaacgcatgttgtagcgcagcaggttgataagccagcggggaccgcagacgaaggctccgatgccggccatcgacttggcgaaggtgttgaacagcacatccacaccgtccacgacgtcgaagtgagcggccgtgccccgtccgtggggacccatcgtgccgaagccgtgggcgtcatcgaccagcaggcggaagttgaaatctttcttcatcgccacgatctcgtccagtttgcccaggtcgcccttcatgccgaatacgccttcggtgatgacgagtacgccgccgttctgctgctccgccagttccgtagcgtgcttgagttgcaggcgcagcgaagccatgtcgttatggccatatacgaaacgcttgcccttgtgcatgcgcaggccgtcgatgatgcaggcgtgtgcctcggcatcatagaccaccacgtcgcgcggggtgaggaggcagtcgatgatcgagatcatgccctgatagccgaagttcagcaggaaggcgtcgggtttgccgacgaactctgccagttcgcgctccaactgttcatggtatttggtctgaccgctcatcatgcgggcgcccatcggggcagccatgccgaattcggcggcacctttggcgtcggcttcgcgcacttcggggtgattggccaggcccaggtagttgttcaggctccagttcagcatcttctgtccccgaaaggtcatgtggggaccgatttctccttcgagtttggggaatgcgaaatacccgtgggcataacccatgtacataccgatagggcctccggcattcttttcgaggcgttcaaaaatatctaccatacgtgttcgttatttgattttaagattatgcgtttcagtagtccacaaaagtaaaaataattgtcgggatgttcaaacctcccggattcttttcgtgaaaagtggtataaatacttactgtttgtcaccggataagcggtattgtatttgtccaggcatcccgtttttccggtcgttgtttcggcattaccttcccggttttttattggaacgaatttgtttgagtgtatttgttttgtcgaattttccttttcggaatttattgttgcggtttgcaatcggagctgtatatccgattctatcttgtggacggggaggcagagccaatgggtgcggattttttcctctgcctcttcttttccgagaagggcccggagcgaaatatctgcctttgtcttatcggtaagtgaatgcgcatataaaaattcagccggacttctttacaagtccggctgaatcggaaaaatacttttatacaagaaaaattcgcttaattgatgtttttacggtcgggaaccgtattgggcgatgcagcttccatgtcggtttgcagcttgaccatctgaatggccgccgctgccgcttcattgcccttgtttccgtattttccgcccgcccggtcgaatgcctgttgctggtcgttcaccgtcaggataccgaatgctacaggcatattccactgtatctgcaactgggtgataccctgtgtcacgccctggcagatgaaatcgaaatggcgggtttcaccctgaacgacgcagcccagagcgatcaccgcatccacgtccgtatattcggcgaaaaactgggtaccgagagtcagctcgaaagtgccggggacatatttgatctgaatattcaggtcgctgcatccggcgctgcggagggtttggaccgctccctcgagcagggcttccgtgatttcccggttccactccgctacgacgatgccgaacttcatatcggctgccgacggcagcggggcgtccaactgcgaaaggttgtgatgcttggttgacatgcttggattcgggtgtttcgcgttattgctggatcgtgcccatcagtttttctgcattctgtgcttcggccgatgcagggaattcgttttgaatccgctgggcgaatccgagcgcctgctctttgttgcccatggcattggctgccagagccgctttacgcaggtacatcggggccgtcaggttgttgtccgaaaccttggctgccttctcgaacagtttgatcgctgcggcataatcgcccttctcgacggcgatatcgccctgcagacctatgttctgggcattgacgatctctgcgggaatgcctttggccggtttgtattttgccaggtaggtggccgcgttgtccaagtcgcctaaacgcaggtagcagatgccggcatagtgcttggccaggttgcccgcacgcgtggaaccgtactggtcgatgacatcgaggaagccggggccgttggcatcgccttcgagagccagctggtattcgggcgtggtcgattcgaaccggtactgggcctgagcgatcatctcggccgccttacgctcgcggggctgtgagatcaactgtcgatagccgaagatggctgcggcgagtacgaagagggccagcagcgcgatgatcatcgatttgctgtttttctcgaaaaacatctcggttttattcatcgctgtgccgagtgcttcctgctcgttttgctttgtcatagaaatatgcagttttagtttgaattttcgcttctaacgtgcaaaaatacattttttctttgaataatgccaatatctgccgagaattgtagagccgccgcgaagaaaaaagatgaatttcaccggatgatgaccgcattgaccagtcggattttcgagcggcggttgatttcggcgcccaaggcttcgcgctggtagaaaagttcgttgcgcagaatgctcgagcggatgcggacgtgcagaatgtgattttcgagccgcagctcggtggtttcggcgtcggctgccggaccgacgatctcgcgccaggtgtcgcgcagccgtccttcggcgactttggcggcgacgtaaggacgctggaaaaattcgtcgagcagttcgccgacggtgaccgtcttgcttcgtttcatcgcacgattcctccgttttcgaccgtgaagagcgagtagtcgtcgcctgttttgtccagaatggtgcgcagacgcgtcgggttgcagtcggtgatgaagatctgtccgaaaccatcgtccccgaccagccggatgagctgttcgacccgcccggcgtcgagtttgtcgaagaggtcgtccagcagcaggatcggtttttcccctttggcttgggcgaccagggcatattgggcgagtttgagagcgatcagaaacgatttttgctgcccctgcgaaccgtatttgcgcaggggatagccgccgatgcggagtaccagatcgtcgcggtggatgcccgcagtggtgaatccgttgacgaaatccttttcccgggacttgagcagcaactcttcgaagggggtgtcgttcagctccgagcggtattcgagcgtcacctgttcgcggtcgctggagaggtggcggtagtatcgggcgacttcgggttcgagcagagctgcgatttcgctgcgtttgcggtggatgatgcctccctgttcgaccagctgacggtcgtatatgcagagcatctgttcgtcccgcgagattttgagcaggcggttgcgttcgcccaatacggcgttgtagcgtaccagagcctgcagataagcacggtccaactgggagataaaaccgttcaggtaacggcggcgttcgtcggcggcgtcgctgatgagcatcgtgtcggccggggagacgatcaccaccgggatcaatcccacgtggtccgagagtcgttcgtactccttgccgttgcgcttgagggttttgcctcctttgcgggcgaaggcgcacacgacgctctcgctgcggcctccgtcggtgaggtactggccgtcgagcagaaagaaatcgctgccgtggcgcatgctctgcccgtcggtcatcgccagcgacgacttgcacatcgaaaggaaatagaccgcgtcgatcacgttggttttgcccgctccgttgtcgcccacgaagcagttgatgccgggccggaattcgagattctcttcccggatgttcttgaaattgatgagcgacagttttttcaggtacatgagtgcgttttttcgtcgatgccggtatgagcggggacgatttcgtgtttatgcgtgcggtgttcgtacatttgggtttcggtccggacaatacctcatatgcgaggcgagtcgtgcagggtctttctgcggagttggtacgctatgttcccgaccgtgcattgctccgaagcgtgaatttctccgtgatcggattctccttgcgtcagtttggcatggccgccttcgtcgtccggggccgcagccatttgcaaaggtagcgatttttttgtttttgccgatcgatatttccggattccgcgaaggagggggacatgcgggggcggtctttctttcgggcgatccgacgaaaaaggccgatctgtacgatcggccttttcgattgaaacggaggctggggattactcctctgcggttaccgtaaatttgattgtcgctttgacgtcgcggtgaatcttggcgacggcctcgtattcgccgagggtcttgatgttctccacggcaatggtcttgcggtcgatttcgattcctttggcagccaaagcctcggcgaggtcggcagcggtgatcgcaccgaagatgcgtccctcctctgccttggcagcgattaccagcggcaggttggcgatcttctcggccagagcctgtgcgtcggccaggatcttggcatccttgtgggcacgctgcttgaggttctctgcgaggatcttcttcgcagctgcggtagctgccttcgcgtaaccctgggggatcaggtagttgtttgcgtaaccgggttttacgttcacgatgtcgttggcgtaacccagattctcgatatccttgataagaattacttccatgttctctcctcctctttattatttcatacaatcggttacgaagggcaggatcgcgaggtggcgggcacgtttcacggcctgcgctaccttcttctggaacttctgcgaagtacccgtcaggcggcggggcagaatcttgccctgctcgttgaggaacttcttgaggaactcgccgtccttgtaatccacgtacttgatgccgagtttcttgaaacggcagtacttctttttcttgacgtcaaccgaaacggggttgaggtatctgatttcagactggttgttgttttcctgtgccatggtttactcctcctgcttgttagaaagtttcgcacgacgtttctccgagtactctacggcgaatttgtcctgcttgaaagttaagaaacggatgatccgctcgtcgcggcggtactgcgtttcgagggtgttgacgatcgagccttcaccggtgaactcaatcaggaagtagaatccggtggtcttcttctgaatcgggtaggcgagcttcttcaagccccaggcctcgctgttcacaatctgaccgccgttttcggtaattacaccctggaatttgtcagcgacctccttgacctgtgcatcggaaaggaccggcgtgacaatgaaaacggtttcgtaattgttcataatcgtttgttaattagattaatatgcatttagcggatgcaaaggtataaaaaataatgtaaaaatcgtcttgcgaggcctcttttttatttattgccggcaggatttatttatatatattggtatattttcggtgccgctgccgcctggctgtttgccgactgggactgtcggggccggggcgttcggtcggaaggagggcggagcgtgccgtttgtctggtgtgtccggtgtgagccgagttttgcgaggactccgggaaaaatttttcttccggaaggggacaaaacaacgggattccttcgacaggaatcccgtgaaatagatgtgtatgaggtcggagttacttccgaatggaatcgatgacctgacagatgcggtcgaagacttcatccatggtgcccaaaccgttgatgtcggcgaattttccctgtttggcgtaaaagtccgcgacgacggccgtctgttcgtgatatactttgatacggtcgcggatcacctcctccgaagcgtcgtccgctcgcccggactctttgccccggagcaggatgcgttttaccagctcctcttcgggaacgtccatgtagatcatgacatcgaccttcaacccctgttcggacagcatccggtcgaactcctcggcctggtgcgtcgtgcggggaaagccgtcgaaaatgttgcctttcgcgtgtttgtgcgccgcgatgtagtcggcgatcatgtcgatcaccacctggtcgggggcgagtctgcccgtggtaatataggactccatctctttgccgagtttcgtcccccgggcgatttcttcccgaattacgttgccggtcgatacgtgatcgattccgtatttctctttgagccgcgccgcctgcgttcccttgccgcatcccggggccccgaataaaacaatgttcagcatcggttaagaattttttaacgctaacaaatataatctttttttgtcaaaacgacaaagtttcggtatttttgtaagatatagcgcagatttttcgaatttcgctgcgacgataacccgcacgggaagagaatccgtatgcgggaggtacatacgattgtaaacaatattcctatggctgataaaaaacctaccgagatcgcctcgctcggcgaattcgggctgatcgaccacttgacggattctttttccgtgcgcaatgcctcgacgcttcggggggtaggcgacgatgccgccgtgattgcggcgggggcggacgaggtgacgctctgcaccaccgatctgctgctcgaaggggtcgatttcgatctgacctatttccctcttaagcacttggggtacaaggctgttgtcgtggctgtcagtgacttgctggcgatgaacgggcgtcccgagcagttgcttgtgtcgctcggggtgtcgtccaagatttcggtggaggcgttggatgacctgtatgcggggattcgattcgcttgcgaggagatggaggtcgatctggtcggcggcgatacgaaggcttcggtgaccgggctggctattcacgtgacggcgctcggacgggctcgcaaggaggaggtggtttatcgcggcggcgccaagcttcacgacctgatctgtattacgggtaacctgggggcagcctacatgggactgcaactgctcgaacgcgagaagcgggtgttgcggggggtgaaagatcccgaacccgagttcaaaggaaacgaatatctgttgcaacgctacctcaagcctgtcgcccgcaaggatatcgtcgagctgttggccgaggagaagatcgtccctacgtcgatgatcgacctttcggacggtttggcgagcgacctgcttcaaatttgtaaagcctcgaaatgcggagcccgcatttacctcgaccggatccctatcgcccgtcagacgacggctttcgccgaggagattcataccgatcccgtcgtggcggcgctcaacggcggcgaggattacgagttgttgttcaccgtgccgctggccctgcaagagcgggtgatgcgcatgggcggggtcgatgtgatcggacatattacggcggaaaatacgggtgcctacctcgtaacgcccgatggcggcgagatccggctcaaagcccagggatttcgggataaggagtagggttattttcgcaggcccagatgcgataacagggatcggaaacccgttttgatgcgacggggcaggttgaacccttgtcgcagcataacggctccgcagagaatctggggattccactggcgcagttcggcatagcggaccagtacgaccgagagggccggaggcggaaggttgtccagatgtttgaaaacctctacacagtcgttgcgtgtcaggtggcggcaaaaccggatgcggttgatgtcgatcagtgcgaatcggtatttttcgccggatttgtaaaagaatacgttgcccgggttcatgtcgaggttgaacactcccttttcgtgcatttcgacgatgaaagccgcgaaatcctccagaattttgcgggattcttcatctccttcctgcagggtactcagcaacgggtgggcgatgaattccgaaagaaaataccccgtgtggaacagaccgtgacgtgagatttccaggtaagcgaccggggcggcggtttcgaatcccaactgttgtaaccgcaaggcgtattcgtaggctcgacgggctttgcttttgcggaaaagagtgtaggcgaattggttgaggcgggtcgggcgtttatactgtttcagaacgaaaatccgacctcctgtcagctcgattttgcggaccgtattacgccggtcgcagtaagtttccaggatgcgatagtcgcccgcagggatttttcggatctcttgctgcaagtatgcgtatgtcggcgacaggacgattttcggattttgaaacatacgtcaaagttcggggtaaagcatcgccggagcaaggcccaaaatgcagtaaagctattcaaaaagtaggatttccgtaaagcgatacaaataacgaagagccgtcaaattttgacggctcttaaatttaagcattggataacagtcccttacaaggcgtttacatgcatctgcaacgaacttttcaggttgccggctttgttcttgtgcacgatattgtgcttggccagcttgtccagcatcgaagtaaccttcgggagaagtgcctcggctgcactcttgtccgtcgtgttgcggagtgctttcacggcgtttcgtgccgtcttgtggaaaagacggttgtgtgcgcgcttggctacagtctgacgaattctcttctcggatgacttatggtttgccataatcgttaatttttatttttaatttttttcgttctttagttttacggcgacatatgttgaaatgacgccttgttcgtgacggccttggccgcctgcggaataggccgaaacccgcttccttcgttgtggtttccccgtcagcgccctgaaaacataacatacggccttaccggccgtcgttatgcgcttaaaacgctgtcgtgtagcccatagcagagtcgaactgctctttcaagaatgaaaatcttgcgtcctaaccgatagacgaatgggcctcctgtgctatccgttttccctcgatcgggaaacctttagcggtgcaaaggtaaacaaaaaagttttctatgcaaaaaaaatgtgggaatatctgctttttttcgatatgcgatatgaaaaaaacaggaatatgccggccgtctatgaattattatataataaggtaagataatatacgactatacgacaccattatccgacgatcgcagtatctaatccgaaggtgtttacttgcgacctgtttccacgtttataatccctttccctcgtaaggggcttgggggcctgcgcttccaaagagggataatcacgcaaggtaagattgatgttgagaacttttttaggccgaaaggagcgtactttgacattgtaagaatggaataacgggagattttaagccggttttttgccgaagagtgaaaaaatatttgcatttcatttttttgtaaggcaaaagttcgtatatttgcactccgaaagagttcggggtgtagctcagcccggtttagagtacgcgtctggggggcgtgtggtcgcaagttcgaatcttgtcaccccgactgatgaaaaggcttggtaatctgatgattgccgagcctttttcgtttatgtgctccgagcggaagtagggggcgctggggacgcgaaaagccaatcgagaagtctgccaaaattcaataaaacgacgattccggctttttatcggggcaagttttcaaagcgggtgatatttgtcgtattctttattttcaaagacggttatcgcgaaggtatggggtttattcggggattgtagatccctgtttcgagtctcgatgtcttggcagaacttcggtatatttcccttttcgggatggatgtactctgaatgataagtgcgtggtaatttgtgtattataaaaaaaggccttccgaagaaggccttttcgggtggaagatggggctcgaacccacgactttcggaaccacaatccgacgctctaaccgactgagctacatccaccatatcggtcgataccgaagatcaaccggagtgcaaagataataggttttttccgtccgtgcaaaaaaacggcgaaattcttttcggattctgtgcgtacggtcctctctgacggtatcgatggagcggaaacgtacggtgtcaggatgatgtatctgccgttttgtcaaaatgacagtcttgccgcccgatttgtcagacttttctgtcaaaaatcgtttggcatatctcttgttggagttatcgtcgcaaacgcgaagttgaaaaactgttaaatataacttataacaattaaaatcataccactatgaacgtaaaaccattatcagaccgcgtgttgatcctgcccaacccggcggaagagaaaacggccggaggtttgatcattcccgatacggcgaaggagaaaccgctggcaggcaaagtaatcgccgttggtcccggtacttcggaaatcaagatggaagtcaaagtcggcgatcaggtgctttacggcaagtatgccggtcaggagatcaatgtcgatggcacggattacctgattatgaagcagcaggatattctggctatcatttaattagttcggttggattaaaaaaattacgattatggcaaaagagataaaatacaacgtggaagcccgtgagcttctcaaggagggtgtggacgctttgtcgaacgctgtgaaggtaacgctcggtcccaaaggacgcaacgtaatcatcgacaagaagttcggtgctccccaggtgaccaaggacggtgtgaccgtcgccaaggaggtggaactggaggatgcgattcccaacatgggcgcccagatggtcaaggaggtcgcttcgaagaccaacgacgatgccggcgatggcacgacgaccgcaaccgtgctggcgcaggcgatgatcggcgtgggactgaagaacgtgaccgccggagccaatccgatggacctcaaacgcggtatcgacaaggctgtcggtgtggtcgtggattcactcaagaagcagagccagaccgtaggcaccgatttcgcaaagatcgagcaggtcgctacgatttccgccaataacgacggtaccatcggcaagctgatcgccgaggcgatgggcaaggtcaataaggagggtgtcatcactgtcgaggaggccaagggtaccgaaacccatgtggatgtggtcgagggtatgcagttcgaccgtggctatatctcggcctacttcatcaccgataccgagaagatggaggcgcagttggacaaaccctatatcctgattaccgataagaagatctcgacgatgaaggagctgatgggtgtgctcgagccggtggctcagagcggacgctcgctgctgattatcgccgaagatgtggatggcgaggcactttccgcactggttgtcaataagttgcgcggtacgttgaagatcgccgcttgcaaggctccgggcttcggcgaccgccgcaaggagatgctcgaagatatcgccgtgctgacgggtgccacggtcatttcgaccgacaagggtatgaagatcgaggacgcgaacctctcggtgctgggtacggcggagaaggttacgctcaacaaggagaatacgacgattgtcgatggcgccggttcgaaggacgctatcgctgcccgtgtggcgcagatccgcgccggtatcgaagccgctacgtcggattacgacaaggagaaactccaggaacgtttggctaaactggccggcggtgtggctgtgctgtacgtcggcgctgcgaccgaggtcgagatgaaagagaagaaagaccgtgtggacgatgcgttggctgcgacccgtgctgccgtcgaggaaggtatagtgccgggcggcggtgtcgcttacatccgtgcggtggaggctttggagacgctcaagggcgacaacgaagaccagacgaccggtatccagatcgtaaaacgcgctatcgaagagccgctgcgtcagatcgtgacgaatgccggcggcgagggttcggtggttgtcaataaggtgaaggagggcaaaggcgccttcggttacaacgcccgcgacgaccgttatgaggacctgctcaaagcgggtatcatcgacccgaccaaggtttcgcgtgtggcgttggagaatgcggcttcgatcgcttcgatgttccttaccacggagtgtgtattggccgagaagaagtcggacgctcccgcaatgcctgcgatgccgggcggcggcatgggcggtatgatgtagtccatcgcttctcttatgaaaagttcccggaatcgcatttgcgattccgggaacttttttattccgggctgtcgtgtatgaagtccggagagccgttttcagggcggcgggcgttctgcggttcatacgaatacgacgctgcctgctgttggaaagacatacggaaagggctcggggaaattccgatggcttttcatacacgactgatgcggtcgtgatccgtagcttgtctgccggaaaacggagggaatgtggaactttttatttccgggagcgtcagaggccgccgtcggccacccacgaaccggtggggttgtcattgcgcagagcgagcactattttttcgatgcggccatcggacattttcactcggcagggaacgaatactcccgcgtactgtcccgaacggaaggctggctgtgtttcgaggaggcggcagcctgcatatcgttccttcataaggtcgagcggatagtaaacgagtccttcggcgagtatttccgtatcccacgtctgcatggcggcgaagagcttgcgggccgcctcttccggtgcaatggctgcgaagtgtacgccgccgaccggtttggtgaggtcgatccattcgatgccgtcgtaagcctgaaagagggtgtcggacagcggtatgtcgtaaacgatgcgttgcaattcggcgatggttacgggtgttttgccgtcggtctgctcgattttcagcccgataagccgtccggtcgtccgatcgaagcggtattcgcgtcgggtgtcggattcgtcgatcgaggttcccgacaggtagtcgttgctgaaatccccttcggccggcgcttcgacggtcagcgtgatcgtttccggtccgacttgcttgctgtaacttgcgttccggcgctcggcgaagttgagctcttcccgcagcagcagggtgtaggggtcgagcagggtggcgaaatcttcgattgcgccgctaccgggacgcatgatgaagcccgagtttatctcaggactccacatcaggatccgttccccgtcgctcagggcgatccgtcctgctttttccagccgccagcggcctgaacccggttccacccacatacggtgggggacaaaggggacttcggcatcgatgtagctgaaattttcctggggaagagtgcggacattcatttcgaggcggaacgaacggcttttgtcgagttgagcggcagcatcgcggaagatacgtcctgcggcgtgggcccgatagcggccgacgggatcgaagacgagcagtacgagggcgatgagggctgcggcgctcaacgtcgcggacagcggccggagccacaatcgccgaggccgtgccggagcggtcgttcgtgcggttgccggcgtattttcggcttgtgcggcggttttcagaatgcgggctttcagaccggccggagcctgcacttcgacgcggggagcgacggcgttgaaggctgctttcgtttggcggtagaattcggcgcaggcgggacatgtttcgaggtgttccaacatttcgcggcgaacctctgcgggggtattgtcatcgaacagcagttcgattcggttttcaaaatcggtgcatttcatggcggatgatttttagtggttgatgagtttgcggagcttgccgatcccgtaacggaaacgggatttgacggtcgcctcggtggtgccggtgatctcggcgatccgggcgaaagtcagggagtcggaggttttcaggcggatcacttcggcctgttcttccgggagggttgcgagcagcccggcgattcgttcgtattcttcgcggagttcctgatcgccggagtcgtccgcaagtgcggcggcccgttcggtcggcagcgtcgcattgcgccggtggcggtggtagtcgcagcagcggttggcgatcgcccgccagaggtagcgctccacgtcgtcgatgcggtcgaggttgcaatccgagtggaagagccgcagcaggacgtcctgcacgatgtcttccgcatcggcctgcgatcccgtgcggatataggcgaagcggtaaagggaatcctgtcgccgatcgacgatccgctcgaggagtttcagtttcgtttcttgcatattctgtctgttttaacgacgcgtctattcataagacgtacccgctgcgaaaaagatttaaccgaagcgtaaaaaacggcgtatgccgatatatttttgtttgccggcgtcggatggaagggtttgctgcggattttgcggaacgggaatttccataaaggatatggcaacccgttacggaaggatttccgatggcgaaatgcctgcactgtaggtttcgacgggaaatccattgcccggctctgcaggtcggtaaagttcgtactctcttgcgtgagagaataatcagctttgtaaaggtattgacagaccgggaatagtggcgtcggatcgttcgattcgtgaaaatgatcgtgtgccgacgtatctgttatttgtccagcaggatacgagcctgtgcgagtgcggcttccgtgatttggctgcccgatagcattttggcgatttcggtaatccgctcctccgggtcgaggcggcggatatgggatccttcggcgtctttgtaaaccacgaagtgagtgtcgcctttcgaagcgacctgcggcaggtgggtgatgtccacgacctgcatggtctgcgagaggtcggcgatgatctcgcccatggcgtcggcgatgcggcctgaaacgcccgtgtctatctcgtcgaagatgatcgtcggcagctccatgcggtgagcgagcaacgctttgagagccagcattacgcgtgaaatttcaccgcctgaggcgatgcgttccactttttgaggagcgaaatttccgttggctgtgaacagaaaatctatttcgtcgtcacccgtgggggtcaaggccggtgcgggggtgagctgtacgacgaaacgggcttcgggcatgccgagccgtgcgagggtcgtctgaatcgcatcgttgaacgtcggtgcggccttttcgcgggtggcgtggatgttccgggccagctcttcggccttctcttcggtggcggtcagttcggtcgcaacggcggcgatggcttcgtcgccgtgcgtgatcgcttgcaggcgtgcttcgtaatcggtctgtttggcgaggagttcgccgagatccgcagcacggtgtttctggcagagcgagtagatggtgttgagtcggtcgccgattttttgcagccgttcgggatcggcgtcgagccgttcgctctgtgcggcggccgaggcgccgagatccttcagctcttcgagcacggagcggagccgtccggcggcttccgctgcgaaaggatagccggcttcgaggtggcggcaggccgtttcgctggccttgagttgtaccaacaccccgatttgttcgtcgtccagggcattgcgcagcgccgtgagggtttcgctgatgcggtcggcgttcgaaagaacctccagctcctgttccagttcggtttgttctccttccttcaggtgggccgctgcgagttcttcgacctggtagcggagccactcttcgtccttgcgtccggcttcggcctcttcgcgcagccgtgcgagttcacggcgcaggtggcagagccgttcgtagagggtcgtatattgcatccgcaggtcgtggttttcggcgaccgtatcgacggcctgcgtgcggaaagcctctgatcccaggatcagattctggtgttgggagtggatgtcgatcagttgcgatcccagttcgcgcagcaacgcaaggggaacgggagtgtcgttgatgaacgagcggctcttgccggccggggtgatctggcgcgtgagtgtcgtttcgcggctgtaatccaggtcgtttcggtcgaagaatgcctgcaggtcccttgttccgagatcgaaaacgccttcgatcaggcaattacgtttgtcgtctttcagggtggcgttgtcgttcttgttccccagcaggaggcccagcgcgccgagcaggatcgactttccggcgccggtttcgcccgtgatgatgttcagccggtcgtccagctccagttcgagccggtcgatcagggcgtagttttcgactttcagacgacgtagcatggctatttcagaatggattcgattttgtcggcgatcttctcggccgtttcggctttcgagagcagaggaagctcctcgcgtcctgcgcggtcgatgagcgtcaccttgttggtatcgacgccgaatccggccccggcgtcgcgcagtgagttcagaacgatgaaatcgaagtttttgcgttggagtttcccttcggcattggcctcttcgtgatcggtttcgagggcgaagccgaccaggatccgacccgctttgtgcgctcccagctcggctgcgatgtcgtgcgtgcgtttgaggcggatcgtcagctcgccgtcccctttcttgagtttggtcggggcgacctcttcgggggtatagtccgcgacggcggcgcacatgatggctccgtcggctgcggcgaactccctcaccgaagcctcgtacatctcctgtgccgagaggacatcgatacgtcgaactccggtcggggtgggcagcgacgtgcggccgctgatgagtacgacttcggcgccccgccgggcgagcgcttcggcgatggcataccccatcttgcccgtcgagtggttcgagatgaaccgcaccggatcgatggcttcgatggttgcgcctgcggtaacgatcagccgtttacctcgcaggctcttttttttttcggaaagaaggtcttcgacgaatgcgacgatgtcggccggttcggccatgcgtcccttgcccgaaagtccgcttgccagctccccttcggccggttcgacgatccgtacgcctcggctgcgcagaatccgcagattctcctgtgtggccgaatgcgcgaacatgtccaggtccatcgccggggcgaccgctaccgggcagcgggccgaaaggtaggtcgtcagcagcaggttgtcggcgatgccgtgcgccatcttgcccagcgtattggccgtcgcgggggcgatgagcaggcagtccgcccactcgccgagcgagacgtgggagttccactccccgttttccggattgaagaattcgaccaggatgggatgcttcgagagcgtcgccatggtcagcggagtgatgaactgcttggccagcggagtcattacgactttcacctcggcgcctgcgcctttgagcaggcggcagagtatggccgctttgtaggcggcgatgctgcctgtgatgccgagcaggatatgtcgtccttcgagactcataccgcgatgtttaggcttgcggtttgttctccttgtagaagagttcgccgtcgaggaactcctcggtggcgatcagcaccggtttgggcagacgttcgtagtaacgcgagatctcgatctgctcgcggttttcgaaagtttcctccatcgtgtccgtcggcgacgaaaaatccgccagcttgcgcgtgagttcggctttcagttcggtcgaaatctggttggcgcggcgtgcgatgatattgaccgtttcgtaaatgttgccggtttccttatccagatcgaccagtttacgggttacggtgttggtgggagtgcttttcttgatctccatggaattattgtttttctttgttgtttcggtctaaaaagtctttggcgttctgggccagccggtcgagctccttgaggtagtgcgattcgggaaattcggccacgaacgagtaataggagtcgagcgtcgagaggtagcggtctgcctgcttgtcctgcacggagttgtcggccagcttgctgccggatttgacgatcaggtacatgatctcttcgcggtgggagctggtgggatagagcttcagcgcgttcttgagagctacgatcgccgatttgtaacgtccgattttatagtatgtgtaagcgttcaggtaagttttgtcgtgcagccgctgggtcaggatcttgtccatctcgcggaattcgtcgctgcgggagctgttggggtagtgggccaggtattcattgaccgccacgatagcctgcgtggtcatcgtttggtcgcgggtggggcccggtgccaggtagaagtaactcaaggcgagaattccttcggcatcttcgaggaagacgctgcgtccgaatttgcggcggaaatcgtcgagcatcgacgtggccacctcgtagtcgcgggtcttgaacttgcagaaagcggtcatgaaggcgatactgtcctcctgcatcgttccggagtagtacggtgcggccgcttcgaacagcattgcggctttcgaccacttctggttctggtaatgtttcagagcggtttggtacatgtggtcgggccgaccgcttttcagaacctgctgtacgctattgcagcccgcagcgaggattgcaaagcacactgtgcacaagacatatagcctttcttttctcatcgggatcaggtttttccgcaattatccggcgataatcgcacaaagttactctttatttaacgaaatcccaaattttttagtgcgggcgctgcggaatcgatgctatgccgacggttttttgcggaaaaacaacggcgggacgaatcggggtcccgccgtgattttccggttgttccgtcaggcgcggtgtgcgatgagccattcggcgatctgcaccgcgttcagtgcggcacccttgcggatctgatcgccgacgcaccagaacgtgaggccgttgggcgaggtgaggtcgcgtcggatgcggcccacgtacaccgggttccgaccggcagcgaacagcggcatcggatagaccttgtcgcccggagcgtcctgcagcacgacgcccggggccgacgcgaaggcgtcgcgtgcctcttcgggcgaaatcgggcgctccgtttccacccagatgctttccgagtgggcccgcatcacgggtacgcgcacgcaggtcgcggaaaccgcgatgtccgagtgcatgatcttgcgggtttcgtggtacattttcatctcctccttggtgtagtcgttgtcggtgaagacgtcgatatgaggtatcaggttgtaagccagttgatacgcaaatttttccacacggggttcgccgccttttgccagagccgcgtgctgctcttccagttcggccatcccctgtgcgccggcgccgctggccgactggtaggtggctacgtgcacgcggcggatgtgcgagagtttttcgagcgcgttgagtgccacgaccatttgaatcgtcgtgcagttggggttggcgataatacgccggggggcgttcagggcgtcttcggggtttacttcgggaaccaccaggggaacgtcttcgtccatgcggaaagcgctcgaattgtcgatcatcagcgtgccgtgcttggtgatcgtttcggcgaactccttcgaggtggagccgcccgccgataccagcgcgatgtccacgccgcagaagtcgtcgttgtgggcgagcagccgtacggtgagttccttgccccggaaggggtatttgcgtccggcgctccgctccgaaccgaaaagcagcaattcgtcgatgggcagacggctctcttccagaatgttcataaattcctggccaacggctccgctggccccgacaatggctaatttcatggctttctcaaaggtgttataggttgtattactcaaaaaattcgtcttcttcgtaccgggttgcactgtcgtccgttttctcggtttcgtcgcaatcgtaaaccggcatgacggccggacgcgtgaagagatcctgcttgctgatacccgtcgaagggtcggcgtaaatccggttgaggaattcgcccacgatcggtagggcgattacgctgccttcgccgcgcgataccaggcgcactgcctgatcctcgccgccgacccagcagccggctaccagtttgggaaggacgcacatgaaccatgcgtcgcggttcttctgcgaggtccccgtcttgccgccgacttcgacattctgcatgttgtaggcccatcccaggcgtccgcccgtacccgaatggatcactccttcgagcatcgtgagcatcgtgtaggccgtgtgttcgctgatcgcatcctgcgtccggggggcgaagctggcgatcagattgccctgacggtcttcgatgcgggtgacgaagatcggagtggtatagacgccttcgttggcgaaggtcgagaaggcgctcaccatttcatagacgttggattccgaggttcccaggcagagcgcaggcacaggatcgatgtagctgtggatgcccatgttgtgaatgaagttggccacggcctgcggctgcttggcctgtttcatgatccacgccgaatagttgttgcggctgcgggccaggccccagctcagggggtgcatctcgccgttctgttcgaccttgccggcctccttgggcgaccaaggtaccccgttggcggtttcgatcgttaccggcaggttcggtacgggcgtgcagggactcagtcccaggtggtcgatggcgaaggtatagacgaagggtttgatcgtcgatccgatctgccgcttgccctgcttggccatgtcgtatttgaagtagcggaaattggggccgcccacgtaggccttcacgtatcccgagcggggatccatcgctacgaacgaggcccgcatgatccgcttgtggtggaggatcgagtcccggggcgtgagtaccgtgtcgcgttctcccttgtaggtgaagatcttcatcggacagggcttgtcgaagctcgccaggatggtcttttcgtccacgcctgccttttgcatctggtagtagcggtccgagtaacggatcgcgttgcgcatgatgcgctcacgctcctgtctgtctgcgtcgatgaagagcgttttggtgcgtttgaactgtgcgtccatctggggctggatcaccgactccatctgcttttgaatggcctgctcggcgtattcctgcatccgggagtcgatcgtggtgtagatcttcagaccgtcgcggtagatgtcgtagggcgtgccgtcggctttggtgttcttcaggcaccagccgtagatcggattttcgtcgtactccttgaccgcctgttcgtagtcccagtcgttctggaactggcggcgcttgggccgttcggcgttcatcgtcaggcggagcatctcccggaaataggtcgccgggccttcgttgtgcgagaccggcttgtagttgagcaggatcggcagggctgcgatcgaatcccgctggtagcgtgtgatggcgcctgccgatgccatgcggtcgagcaccaggttacggcgtgcgagggcattttccgggttacggcggggggaatacatcgtggggcccttgaccagtcccgccagcagggcggcttcctggatgttgagttcgtggggttccttgttgaagaaggtgtgggccgccgatttgatgccgtaggcgttcgaaccgaactccacggtattcaggtacatggcggcgatctcctccttggtgtagttgtattcgagtttcagggccgtgatccactccttgagtttggatacgaccaacttggtcgtgcgggcgatcttgccccggttctcgttgatgtcgcggggaaagaggtttttggctaattgctgggtgatcgtactgccgccgccctgcgaggtgttctgcatcaggacggtcttgacgcctacgcgtaccagcgacatcaggtcgatgcccgagtgtccccggtaacggacatcctccgtcgaaatcagggccgcgatgatcggcggcacgtcgtatccgtcgagccggagcagctgggcggagtcgagcgggaagagttcgtcgtactgtacgtaggagcggttctgcacgaagaacgtgcccagcaccttgccgtccgaagagagaatctcggtggccaggttgctcttggggttctccagctcctcgaacgacggcagccgcccgaacaggccggcggccgtgagcagcagcaggagcagcaagagtgcgaaaggggcgaatacgatgccccagagccatttgacggatttgggcagcggtttatgtggggtctgttttttcatcggttcaattcaatatgccgcaaagatagtgaaaggtgagggcaattgtgagaacttgttctcgaaaattgccgaaccgcctcctatcttctgcaaagatagtgaaagccgagagaaaacgggagcttgttcccagttttccgaggcgcttcccatcttccggaaagatggcgcaagccgagggcaaggacaaatttattcggttatgcctcggcgaagcctgtctgaatgaaagcattcgctttcgcaaaggtatgaaaaatctcggattatacgttccggttttctgcgggtcgcttgctgattttatcggttctgccgcccggacggatcagaacggcagctccaggccgaagccgaaccagcagctcccctcgctgggcttgtagagcgagagctttacggtcgctgtggcggctgccgacatacgcaggatgttgaggtccagaagcaggtcgccgccgtacgagtaaatgtcgcgccatgttttgccccggctgccgaactcctggaaccgtgcgtagtcggccccgacgttcagccggatgcgtttgaagtagatcacgcccgaaattccaccttcgggataacagagcgggaactgataatcaacggagccggccaggtaattattgctcgaaatgtcggacgaggagaagcccctgggcaacagccgggtcgatttgtagccgaggaatcgcagccccgacgggaagcggtagccgccgacggaggtttggtaggccgctgctacggagagggagttgtggcggaagaatccgggcgtgtagatccgggcgtaggccgatacgaggtcgctgaagttgcggttttcggggttgaggtcgtacccggcccagagcgtataaccccaaggggtcccgacgtcgcggtaggcggcgcgcaccacgtccgagaagccgattcccagcgagagtttgtggagtccttcgcggtagccgagcgtttgcaggttggcgatgcgtccctctgcgtcgtaacggatcgcatccacgtcggccaccattccgttcgaatactcccagcccgccgagatcgagagctgtcggatatgatgtccccggtcgaaatagaggggcagtgtggccccggccgccgccgaccaatatttggcatgagccggggccggctggcgctcggccttgccgtcggcgccccgctgggcgatgccgtaggtcatgcggtcgccgccgtaggtggcccgggcttccagtcgtacgccgaggccgctataccggatcgtacctttcagcacatggccgtcggaccggctccagccccacgatgcgaaggcttcggtgctcgacagcagattttgggagagaacggtggcgccccacatgagccgggggttgaactcttcgatggtcttgaacgggtcgaacgatacgggggcccaactgtgggcccggagcaggtgcaatcccttgcggtagcggcgtgccggatatttgcggtgcagggaggccgagtcggcgggggtatagcgtaccgtgtcgagattgaccacgttccagcggcggcggggcggattgaccagatcgacgggcagttgcgacggggcgaccggaatcggttcgatgttttcctgacgggtgatgcggtagccctttcggtcgtaggtggtcgtccagacggctccgctgtcggcgggagccggggcgaagctgccgtaggtcgaagtcgaaagacggtattcgcgcccttcgccgaggtcgaagcagtgggcttcatcgcggcccgaggcgatcgagccgtagtagagcttgccgtcggcggcccgcaggtcgctcagcgtgatgtaggcgcctcgggtgacagcctgcaagccttcgccgggttcgattcggccgatccacatgcccgaatcgtcggtgacgagcgtgtagagccgttcggtcgcattgtcccaggccagtccgtgcacttcggagaagcccggcatgggccaggcggtgcgctgccgcagcgaatcttcagcgacgatcgtgtagtgtccgtcgggcgtatattccacccaggccaggacgccgcttcgcccgatcggggtcgggtagagggcattgcgcagtttcggtgcggtgcgggggcgtttttttccggggtcgaggacgacgagcctggaattgacccgctcggggaagagcagcgaacggcggtattcggtccaccagacccgttgtccgtcggttgcggggcggctcgagacgagtcctgtccaggtgcgccgcctctcgcgtcccgttcgggaatcgaccgtaacgagccgtgaagggcggtcgaagtccgttttcagcgctacgagcgtcgtattgttcagggacacgggatgagtataggtggtgtagtttttctccggcagcggcgtgagggtgcgccccgaatccgcgacctttggcagcgaatcccagaaacgattcaggtcggcgaaggcgtcccggaagaggatgccctcgcccgtgccgtagaatttgcgcagggcgacgctggtgctgaaggtcagcatgtaggcgttgcggacgccgtagcgcagggtcttgtcccagatttcacccccatagcggtcgtagccgtaggcgaccatctgatagcccatttggtagtggtcgggaacgaaatcgcggtaggagccgcagaaccacttgtcgcagttgcgcctgcggagcacctcgtaacccagggcgcgatattcgatggtgaagcgcggctggcggcctcggccgtaggaggacatctcggtttcgttcatcaccgcatcgccttcgagcgcccagaggggcatgaaaagcagtccgacggtcgatccctgctgcccgatcaggtaactcaggatgcggatcaacccccggttgaggttgttgtactgaacggcgtggcggtattcgtgggctacgagctgcttgacccagggcatcgagtagctatcgacggagggcgtggtgagaaattcgatgcgtttgggcatccacatcaccagaccgttggactggaaattttcggtatgcagcacgaaagggattttcagcggcgggtggctgaaaccgtgtgtaatcgtggggcgtaccgcctggatataatgcagggttcggtgcgccagcgccgatgccgtgtcgggaaagacaacccgtacgtcctcggtgcgcaggtgtttccagcgcagcgcagccgcatccgcaccccacgaatagtattgggcgcgaacggattttcctccgatgaagaggaatcccagcaggaacagaatcgctgcgaaacggcgcatgggagcaggccgggtcatccgccggcctttttgcatttgtaacccgctttggcgaggatttcgaccacccggtcgcggtggtcgccctggatgatgatttcgccgtccttggctgccccgcccacgccgcagcgggtcttgagcaggcgggccagttcccccaggtcggcatccgagccgacgaaacctttgacgagcgtgacggtcttgccgccccgctgcttgcggtcgagccagacgcgcaggtcctgtcgttcgggggcgagggtttcggtctgcggagcctcctcggtgtcgtatttgaaattcgggtcggtcgaatagaccattcccaatctcgctttccagtcgttcgtcatgtgtgaaatatgcggtcgttgttctttttgccggaaaagctggcacttttgcaacgaaatatttttgcaaatatagtgtaagccgggggctgcgccaaatttatttgagtcaggacgggcgccgtttgttttaggtgtcgccgtatcgatcgtccggaatgtcggggtgattgggtgggcgcagaaaaaaactctttcaatcatatttcggcgactgttaaggagtttgcacttattgccgccggtgcacggataaaatgaaaaaaccgtgtatcttgctgatacacggttttcaatttttcaggtagctccgtttgcagaacttggtgggagctgagggattcgaacccccgaccctctgcttgtaaggcagacgctctgaaccagctgagctaagctcccgaaaggcaagaagccttcttaagcgcctgaacaaggacttgaacctaggaccccatgattaacagtcatgtgctctaaccaactgagctattcaggctttttcgaaaacccgggtttacccctgttttcggagtgcaaatatatagcatttttttattcctgcaaaatttgtcccgttttttttgcaaaaacctcgtatctttacggagaattaatcgtattacgagatgtttcgaaaaacctgtcagctgacttttgtgctgattttgaacgctttgtcgtgtctggcccaatccgggctggtattcgaccggcccgcgtgggatttcggcaccatccgcgaaaccgacggcccggttacgcatcgtttcgtctgccgcaacgaaggggaacaccccgaagtgatcctccaggtcactacgacctgcggttgcaccacaccccgatatacgcgtaaaccgattctcccgggcgaggaggccgaaatcacggtaacttacgatcctgccaaccgccccggcaacttttcgcgggaattggccgtctttacggccgaccgccgcatcgccgccaaactgcgcattacgggttccgtcatcggtcgtccgaagacccccgaagagctctatcccatcgactgcggcgacggactgcgactcgaagacaattttcacgctttcacctatatttataacggccgaacttcggtcgctaccatcggatatgccaacctttcggacaaacccctgactttggagctgcgtcccgaagaggcgagcggacttcttcaggcggactatccccgccggatcgctccgaacgaacgaggagtccttaccttcagctacgacctgccggcggacaatccccgttacggcacgttgaaagagttgctcacggtttgtatcgacggtcgtcctacacggaccgacatctttctgcacggctttgctgtggacgatccccgccgggtggaacaagaaaacgccccaaagtggcaagtgaacaaaaatattattaattttggccccgtgaaacggacaggagctccggcagagcgatctctgacacttggtaattacggcaaatcggccctgataatccgggccgtagaaactccgaaaggtgtcggatgttcgcttcgcggcggagagcggatcgaacccggccaggcgtgcgaaatcgtggtgacattcgatgcgtcgcggcgggattacggtctttggtcggagcgattgatacttatcgccaacgaccccgcgcgtccgatgcagagcatccgcctgacggccgctgtcgaagagtaaggtacgaagagacccggccgaaacaggaggccggacggaaaaaggcgggaactccgacattttccggcagacaggcgcggtaccgacctgtacggacggagccgagcggagagaacggaaacaaatagaaccttttataaaaaagtaatgtacacaatccttgaaaaaagagtgctcgcggagaacatctatttgatgcgcattcatgcgccccgcgtagcacgagcggcaaaacccggacagtttatcatcgtccgcatcgacgaattcggcgaacgagtacccctgaccatctccgattacgacgccgagcaaggctcggtaacgatcgtcacgcaggctatcggagcctcgacccgcaagctctgcgccttggagcagggcgatgcgctggccgatttcgtcggtccgctggggcacccctcggagttcattcacgaagatctcgacaccctgcgcaagaaacgcttcctgttcgtagcgggcggcgtgggtacggctccggtctatccgcaggtaaaatggctgcacgaacacggggtgaaagccgatgtcatcatcggtgccaagaccaagtcgatgctgatctataccgaggagatggcccgcgtagcggacaatctctacatcgctaccgacgacggcagcgaaggcttcaaaggtatggtaacggccctgatcaaagacctgatcgacaaccggggcaagcagtacgacgtctgcgtggccatcggtccgatgattatgatgaagttcgtgacgctcacgaccaaggagtactccctgccgacggtcgtatcgctcaatacgctgatggtcgatggtacgggcatgtgcggcgcctgccgcgtcacggtgggcggcaagaccgtcttcacctgtgtcgatggccccgaattcgacgggttccaggtcgatttcgacgaagcgatgcgccgtcagggtatgtaccgcacgcaggaagagcgtgcccgcgccatcgagcaggagcgcgagaacggtcacaaatgccgtgtcgggctcgacaaataactaccgatccacacacaaccggacgtttccggcagacgagtatggagcgatgctctgcgtccgaatgccgaaggcgtccacagaacaatgaaagcaaacaactatggcaaataaaattccgcgcgttcccgtgcgcgaacaagatccgaaagtccgggccaccaacttcgaggaggtgtgctacggttataatgtcgaggaagccacgctcgaagcgtcccgctgcctgaattgcaagaatccccgctgcgtggcggcgtgtccggtgaatatacgtattccggatttcatccatcaggtcgtggagggtaatttcgctgcggctgccgccgttatctccgaggacagctcgctgccgagcgtttgcggccgcgtctgcccgcaggagagccagtgcgaaggctcctgcgttctgggagtcaagggcgagccggtggctatcggcaagctggagcgcttcgtcggcgactggaaaatcgagaatgccgacaagatgcccgctcccgacatcaagcgcaacggacacaaggtagcggtcatcggcagcggtccttcgggactggcctgcgcgagcgacctggcccgcatggggtatgaagtgaagattttcgaagcgctgcacaaggtcggcggcgtattggtgtacggtattcccgaattccgtcttcccaaggagaagatcgtagccagggaggttgaggccgtgaagaagctgggtgtagagatcgaaaccgacgtgatcgtcggccgcaccgtgaccatcgacgaactgatgaacgaagagggttacgaggccgtcttcatcggttcgggtgccggcctgccccgtttcatgggcatcccgggcgaaaacctgaacggcgtggtttcggccaacgagttcctcacgcgtaccaacctgatgaaggcttacgatacgcattacgatacgccgatctatgtcggtcagcgcgtagtggtggtcggcggcggtaacgtggcgatggatgccgtgcgtacggctaagcgcctgggggccgaagcgaccatcgtatatcgccgcagcgagaaggagctgcccgcccgcgtggaggaggtccaccacgccaaggaggaggggatcgaattccgcatgctgaccaatccgacttcgatcatcggcgacgagaagggctgggtcgtaggtatcagttgcgtcgagatggagttgggcgagcccgacgaaagcggacgccgctctccgatcgaaaaggccggttcggatttcgaaattccgtgcgacgtggtgattatggcgctcggcacttcgccgaacccgctgctcaagatgaccaccgaagggttggaaaccaaccgcaaggggtgtctggtggccgatgaaaagggtgcgactacccgtgaagggatcttcgccggcggcgatgccgtaaccggagccgcgacggtcatcctggccatgggcgccggccgtaaagccgccaagtccatcgacgaatacatccgtcaaaaaaagcattaaacgtttgcgagatatgaagaaattttgtttcgccgcattcgctgctgtccttatcgggacgacggcttgtgcacccaaagctccggagcaattcacgggtaagatcgtcgatggtacgatgaacaccgtcacggtagagtccccggccgacggaaaaagggtgactttcaccacggaggatgccgatatgcaggaggcttacggcctgctgctgggcaatacggcgaccgttacctaccgggggaagctcggcgaggcaactccggctttgaaggtggtgaccgatcccgcctatgttacggccatcggccgctgggtggagcccaatccgatcgactccgagcaggaacaaggcattgaaattcggataaacggcgtcgccgcttcgatcaatatgctgactctgcgctacgaagcttgggaattggcgcccgaaggagatcgaattatcctgagcggcgtatcggaaggaagcggcgggccgtatcctttcgagcagacggccgaaattatcgagagggacggcaagccggccctcaaaatcgatgcggtcattctgaccaaaaaagatctgatctaaattggatgccgtttcatatacggcttggttcgataaaaaaactcacgcttgaaaagcgtgagtttttttatcgggcgccggaaatcgggattcggaaacaaaagacggaacttcgtcgggaaagagtgacggaaacaggcaaaaatggtcgcaaagggaatcgacgaaacgataagccgaaattattccgttttaccgaccaaccgctcgacccggtcgaggatcatctgtggttctatgctccagatacagcggtaatcgccgtatttacagggtttctttccatatacggagcaaggccggcaggcgaaatcggtctgcaagacgccttcctgttcgaacccgtaacccagaaagccgagcccgggatgggtcgctccccacaccgacacggtgggcgtagccatgagcgaagccagatgcatcaccagcgaatccatcgacaccacgcaatccaggttggaaatgaggttcatctcgtcccccagctttatcttgccgtacaatgccgtcacgttcggatagagtgcttccatccggcgggcgaattcggcttcctctccaccgccgctgtggacgaaaacccggtcgaaacgcccgctcaacagacggacggcttcggcgctcaacttttcgggataagtcttgcccggctgggcggagaacggcgcgaaaccgatccatataccctgtttttctcccatgggattgggtcgggggcgtttctcagccggccggggatcgggaaagtcgaatcccaagcgacggaagacgtcgcaatagcggatgacggtgtgtttcaaaggtttcacaccttccgaaccgcgtcccagccgcatgtatttttcgatccgccccttgtgaattaccgaaacgggaatcccccgcaggtggagtgccgcacgcaccatcttcgaacgcagtacgttgtgcatgtcggccaccgcgtcgatcttcagctcggccgcttcgcgggcgaaccgaatggcgccccggataccccggtgcgtgcggcgggtttcgatatccaaaaaatcgacatccaccccttcgaaaaagggatggaacagcgatttggtcgcaacggtcaccttcacctcgggatacgcctccttcagggcgcggagcgcatggggcaacatcgccacatcgcccatcgccgaagtacggatcacgagcaggtgccggggcagctttttattttttcgcggcataaagcacgggattgagcgccggatcgttatacatcttcatctgtttgtaggtcttcatgtatttacgtccggcttcaatatcctcgatcaactcctcgatcgcagtcgaaagatcgacctgctgcgacagcagcacatcgagtttttgctggcaggcagcgcggtgcgcctcgtccacatccttgcggagcacttcctgacgcatgtggtagatcttcagggccaggatcgagaggcgatcgatggcccaggccggggtttcggtattgatacgcgctcccggctgcacgtcgatattcttgtatttatcgagcaggtaggagtcgatgtactccaccatgtcggtacggacctggttcgacttgtcgatgcggcgtttgatcttcagcgcctcgaccggatcgatccggggatcacggataatgtcttccaggtgccactgcaccgtatccacccagttcttcatatagagcaggtggtcgatcgttccctctgcatagggattcgaatgctgatgatccacgtcgtcgtaacgatggtaatcgtcgatcgcctgggcgaatattttattcgcattttgagtaaacatagtctatcctttttattttgtaattatccgaggaaacgattatctttgcagaagataggatatatccaaagccggttcgaacaagttcggcttgccgatcggctttcactgtctttgcatacaaagatcaaacaaaggtaatgaatttttatcacaaagcaatatccctggcgggttttgtattactgaccgtcctccctgcgcaggctcaagtgcggcaaacgcgggaagaatacataaacaagtacaaaaaaatagccgtcgcccacatggaacgctacgggattcccgccagcattaccatggcccagggcatcctggaatccgattgcggcaacagttggctgtcacaggcttcgaacaaccatttcggaatcaagtgcaagcgtaactggacgggcgacgtggtctattacgacgacgatgaaaagggcgaatgtttccgcagctatccttcggtcgaggcatcctatcaggatcatgccgaatttctcgacagccagccgcgctacgactcgctcttttcttatgctcccaacgattataaaagttgggccaggggactgaaagccgccggttacgctacggctctggactatgcgcagcgactcatccgcatcatcgaagagagtaaactctacctgctcgaccgcgaggacggacttaccatttacggagcgcaaaccggacacctcaccgacgactggttctcgggccaaagcaacgtcgatcaagccgcagcgattgcttcgggggcggtcgatcccgacgactaccgcgtgacggtcaatgcccataagggttacaacgtctatcgtaccaacggcgtgaactacatcctggctcacgacggagataccttcgagaaaatttcccgcgacttccgcatttcggcccgcaacctgcgtaaattcaacgatgtaggcaaaaatgcccagcctgttgccaacgaagtgatctacatcggccgcaagaagaagcgttgggacggcaacgttctgctgcacaccgtgcgcgagggcgaaaccctctggtcgctcggacagtcctacggcatccgcaccaaatcgctggcacgtctgaacaaactcaaggaaggcgatgcgctgacccccggtacaacgatcaagatacgataatcaatccttcgatatagcatggaaagcatacccctgcgaaagaaaatcctcgaaaccatcgtgagcaaatcgacgctcaaacagaaggttttcgacaacacgttcgccacattcaacgacctgaaagaaaccctgctggagatggcttccgaaatggacgaccagttggacggactcctcgaccggcgcgtgcggctcgaataccgcgaccggggcaagttcgaagcccagatacaggtggccaacgacctgctgatcttccagatgcacaccgacgtcttcgagttcgagccgaaccacgtcatctggcagaatccctacgtgcagacggaccgggacaactcctactgcggcgtaatcaacatctataacttcctttcggactcgttcaagttcaaccgcaatgccgacgaaggctacctcatcggccgcattttcatcaaccgtgaaaagtgctacttcgtcgaggggaaacaacagacctcgatgcgccccatgcagttcggcaaagcggagatcgattccgaggcgctggtccgcattctcgaatcggcgatctattatgccctccatttcgacctgctgctgccctcctacgacgacaacaagcgcgtgacggtcgatcagttcaataccaaactcgataattcgaaattcgtaaccggcaaacgcctgggatacgatttcgatgtggacgacatttagaatcagaaacagatatagagaaccatgctgaaaaaattactcctgctgacccttctcggcactgctttcgccgcacaagcggaagccgccgctccctccacttaccgcgacatcgcccggctccgtgcgatgaaccagcggacgcagggcatccgtcccgcagccgacggaaaatcctatacgactcttcgcggcaacgccatcgagcgtcacagctacacgaaggacgctcccggcgagctgctgttcgaatggaagaacgacaaagaaaaccgcgatatcgccgactatcagttttcacctgacggaaaactgctgctgctctcgatcggctccgaaccgatctaccggcactcctataccaccgattactacctgaaagacgccgacggcctgcgccccattctgaccgatctgcccggtacgcgcgacgcttcgttctcgcccgacggacggacgatcgccttctcgagcggcaacaacctctacctctacgacatcgtcggggattccgtgcgtccgatcacgacggacggtgtctggaaccggattatcaacggtacgaccgactgggtatatgaagaggagtgcgccttcacgaaggcttacgctttttcgcccgacggacagaagatcgcctacctgcgtttcgacgaatcccgcgtacccgttttcgagatgatgcgttacgacggcaagctctataacgaagcctattcgttcaaataccctaaggcgggcgatgccaattcggtggtcgatctctacgtttacgaccttaaaacgggcgaaacggagcgtgtcgatgtcggtcccgaccggggacagtacattcttcaaccggaatggacgcccgacggacggctctgtttccagcggatgaaccgtcgtcagaaccatttcgaagcggtactgtgcaatccggatggcacgcagcaggtgatctatgacgaacgctcgcccaaatacgtcgatcacctcaacaagactttttatttcctggaggacggacgctgtttcatcgttcgggaggagacctcgacgggttatatgcacctctacctgtacggtatcggacaaggtgtgcttcaccccattacgcagggtgagtgggaagttaccgatttcgtcggattgcgcggcgataaggtttattacatctcgaccgaaagttcgcccctgaaacgcgacctctaccgagttggactcgacggcaagcacaaggagcgcctcactcccggcgacggttactattcgatctatcccagcgccgacctgtcctactacatctgcgaaggcggcgacagctccgcccccggccgtaccgacgttttcaacgccgccggcaaacgggtgcgcacgctctatgataacgcaccgttgaaggaagcgctcgtggaggcggggcttcccgtccgggagttcttcaccttcaccaccgagcggggcgacgagctgaacggttacatgctcaagccgctcgacttcgacccggcaaaacgctaccccgtgctgctgacccagtattccggtccgggatcgcagcaggttgccgaagggtgggggcccgactgggaggacgcgctcgtcacgcatggttatatcgtcgtgtgcgtcgatccccggggcaccggatatcggggcgaagagtttaagaagctcacttacggcaacctcggccgactggaggtcgaagaccagatttcgactgcccgctacatggcccgtcagagctacgtcgatcccgcgcgaatcggcatttacggctggtcgtacggaggtttcatggccttgggatgcgctttcaggggcgaaggtcttttcaaaatggcgatcgccgtagctcccgtcacttcgtggcgctactacgattcgatctatacggaaaatttcaatggtcttcccgacgactatccgaagggatacgacgacaattcgcccgtcaatctcgcgcacctgttccgcgacgacagcacgcgtctgctgatcgttcacggtacggcggacgataacgtccatttccagaacacgatggagatggcccgtgcattgaacaagctcgggaagcagtacgacatgatggtctatcccgaccagaaccattcgatgatgcccgacgatatgatacacgtccgcgagaagatgctccgctatacgttggaaaatttgtaaccggcaaaaaaccgtgaaaaatctgctgctgcatcccacgccgatcggaacggtcggaatcgtcgagaacggtcgggccatcaccgacattctcttcgaagaacaactccccgggcatgccgtccggcatacgaccctcttgctcgagcgggcggcgaaacagttggatgaatatttcgccggaaaacgcacctctttcgatctgccgcttgaaccggagggaaccccttatcggaagaaaatttggcaggtcctcacggaaattccttacggacaaaccatgacttacggcgaaatcgctcgtcggacaggtaatccgcaggcttcgcgggccgtaggcggtgccaaccatcacaatccgattccgatcgtcattccctgtcatcgggtcatcggtgcgggcggcaagctgaccggttacgccggcggtctgccgcgcaaagagttcctgctcgccctcgaaaggaacaggctgccgaaataaaaaacgaaggccggagtgaaaactccggcctttttcacaagctctgctccgcatcacgcaggctcgaacatatctttgcctacgccgcaaagcgggcagctccaatcgtcgggcagatcttcgaaagcggtgccgggggcgatgccgctgtccggatcaccgactgcagggtcatagatgtagtcacaaactgtgcaacgatactttttcatagtccgaaaatatttagattaagtgaaacagtatttttacaaatataatacctcttccgagattcctcgtgtttttccccgaaaatttacgataattctgtacatgccggataaaatcgctccgtaggcatcgaagccgggtactacgccgcagctgtcgggccggacaatcctccgcaggaagcaaagacagctccgaaaggaagacgacaaaaaacgccgccgcaatctatgtgcgacggcgtaatattcgctctttccacccgggcagaagaagcccggttcgaacggatgtctttatttgatgcgctcgtaatattcgcgggtacgcgtatcgacgcggatcttgtcgccggtattgatgaacaggggaaccttgatcgtcgcacccgtattcaccgttgcgggtttgagcgagttggtcgaggcggtatcgcctttgatgcccggttcggtataggtcacttccatatcgacgatcgggggcagctcggcggaaagaacgctctccttctcggtgtggaacatcacctcgacgatctgaccgtcggccatcaggtcgtaattgtcgatcaggttcttgtcgatgttgatctcctcgaaagtttccgtatgcatgaagtgcgcacccagatcgtcttcgtaggtgaactgatagggacggcgctccacacgcaccggctcgatcttcgcaccggcggagaaggtattctccagcacgcggccgttttccaggtttttgagtttggtacgcacgaaagcgggacctttgcccggtttcacgtgctgaaaatctacgatctggaaggtcttgccgtccaattcgatgcacatgccgatcttgatgtctgctgtagttgccataggaatatttttatttacgatttttcgcggaggcaaagttacgaaaaatctgcgtaaatcgggcaacgtcggcttatttttccgaatccgaatcgtttcgtcccgccgatcgtccctcgccggtccatcggtagcgcggtccggaaatacctaaaagagccgtgacccgctcggtcaccgaccggcacaactcctctatggacgaggggcgggcgtaaaatccgggggaagcgggcaacacgacggcgccggcttcggtaagagcggtcatattgcgcaggtgaatcagcgagaggggcgtttcccgcacgaccagcaccaggcggcggcgctccttgagcatcacgtccgcagcccgttcgatcaagctttgcgaaatgccgcaggcgatgcgtcccagggttccgaccgaacagggaacgaccgccatcgcgtcgtaatcggccgaaccgctggccggaggagcgaacaaatcgtcgttgtcgaaaatgcggatgcgaggatcttcgggcagggtcactccttcgaaatcagccacttcacgggcatgagcgctgtaaacgagcgcgatttcggaaacctcttcggcccggagcagttgctcgaggcaaaggcgggcatacagagcgccgctggcggctgtgacggcgacgacgattttcatagagttacaattcgatggttttgcatttgagccccaacttccggatcttgtccaacgtgcggggcaaggcataacgcatgttccggaacgatttttcgctgtcgtggaaaaccacgatagctcccggttcgaggtgtttggttacgttcttcaggcatttgcggggcgagagcgaccggctgtaatcgcgcgaaagcacgtcccacatcaccagcttgtagcgctgcgacaacgcccgggcctgcgccggcgtgatccgggcgtagggtggtcggaacagttcgctgtgaatcaaatcgttggcgaaatcgacatcctcgatgtagcgttccaggctcatcccccagcctttctggtgggagtaggtatggttaccgaccttgtggcccgcgtccacgatgcggcggaaaagatcgggataagcctccacgtttttgcccagaacgaaaaacgtcgccttggcgtcgtacttctccagcatcgccagaatccactccgtgatgcccggcgtggggccgtcgtcgaaggtcaggaaaaccccctccgggtcgtcgatctcccagatcagcgacgggaacagatgacggattattttgggcggcttgagtttcatagcgagaaaaaatactccggcggagtacggcatcgacaaagatagtacaaaatcgccgattttcaacagacgatcttccggtgcgttcgttttataggcaaaatgaaaaatatgaattcctcctttgcggaatatgccgctgattctcgaaacagccgacgaattgcgttgggcggaggagatcgcggaattaaaacggttttcggaagaacagtcgaacggttgcgattcgcttcccgtcgaaacggctgtttcggcgggaacttttgtgtgaaaatatttgtaatcttcgattgtgttttttatatttgaaatagataagccaccgcaggctgtctgtaaaattttatgcctatgaaaaatttgatatggatattggcggcgattatgcttgcaggctgtggtgacaacgaagagggtcaggatatggggctgcatggcgatcctcccggatatagcctttttatttggtcgaatgagagtgatcaccggataacgatgacggtaaccgatcgattcgagaagaaagagatccttcccggagaaagcctgttgcaggaggaggtcggttttattattcctctcagccttgaggaatacacaggaaacggagtgacggtcgtgttcgacgatggctcgtacgggggtgtatttttcaggacagataaggttgaggcgttcaatccttgttttgaatgtaattatacggtggaacggtcgaatattgacggttatatcccctatgttcgttggacctacaccttcaccaacgccgactacgatgcggccgtagctcgcgggccgatgaaggaacagtataaccatacgggagcgacttgtttgcaggcacgaaacccggccggggaatatttcccggccgggtttttgcaggaaactctgccgaagccgtttgcattctcgaaaaatatccctacatttgtagtaaacagattaaccggaccggactatgaaaaaattatcgtatctgctgacattgctgctgctcgttaccctcatgacgggctgtaaagcgttccatactctgatggattcgaaactcaaaaccgctcagggggcaccgtacgaattgattgtcgtgtgcaaccaacagttgtgggagagcgagttgggggatacgctgcgttcggtgctgttggctccgattccctatctgaacgaacgggaacctctgttcaacgtgatgcagttcccggaatcgggattcaaaggtacggtcgtcgattaccgcaatatcctcaaagtgctcgtcgatccctcccttgcggcggcttcggccggtgtgcaatacgatgtcacggcttctccgcaggtcgtggtgacgcttcagggaccgacccgggaggcacttacgcaatatgtcgcggagcatcgtgcggagttggtgcaaaccttcgaaggggccgagcgcgaccgctcgatcgctttcgccaacaagttcaatcagacggaatccggcaagctcgttcgagaaaagttcggcgtggagatgaagattcccaaaggctacatcctggcccaacaaagcgatgatttcctctggttccggtacgaattcccggctgcgagccagggcttcatgctctattcctatccttacgaagggaagcagtccctttcggaggaggcgttgctggctgcccgcaaccgtttcgccgcccgcattccggggccgagcgacggctcctatatgaccacatcgaaagtctttacgccccggtatcggtttttccggctcgaaggcagagcctgggtcgaaatgcgcggattctgggatgtcgaaggggatttcatgggaggtccgttcgtaagctatacgaccgtcgatacggcgaccgaccgggttttcacgctggattgttatgtttattctccgaaacttcccaaacgcaattatatgcgcgaagtggaacacttgcttcatctggtgaaattccccgcagcgaccggttccgcatctgcgactgtcaccgctggcaggcgggaggcggcaaaatcagatgctccggcatcccgggacgcaaatccgaaacccgaagcaatctcgtcggaatcctgataatccgccgccccggtgttgcaattcctgacatatctgttcatcgccatctatacggcgacggttatcggcatcatcctggttgtcattttgggcaaccgcaacccgctcaagacgatcccgtgggtcgtcgtgctgattttcgctccggtcgtgggattggttttctatttcttcttcgggcaggatctgcggcgcaagcggattatttcgcgccgtacctacaagcggctcatggtctatgctcttccggcccatgtgcgtcgaagcgatgcccccgttccggccgcatgtcaatccctgtccactctgcttaccaatacttcgcaggcggtttccttttacggcagccgcctgacccattacggcgacggggcttccaagatgaccgccctgctcgaagagatcgaaaaggcccgcgaccatattcacattctctattatattttttgtgacgatgaaacgggtgcccgtcttcagcaggcgctgatccgcaaggcaaaggagggtgtcaaagtccgcgtactctatgacgacgtaggctgcaacggggtcaagaaagaatttttccagcagatgcgcgatgcgggtgcggaggttcatgccctgctgcatgtacgctttccgatgctgaccgaccgggtcaattaccgcaaccaccgcaagatcgtggtcatcgacggccgggtaggttttttcggcggtatgaatatcgccgaccgctatgtgaaaggaccgggttggggggtatggcgggacagccacttcaaggtagaaggaaagggggtgtatggcctgcaatccgcatttctggtggattggtcgaccgtcgaacgcgtacatctggatacctcgaagttctttcccgaagccgacaactatacctcatcgaccatgcaattcgctactagcggtccgttggggccttggcgaacgttgttgcagggtattatgacggctatcgccggtgcgcgacggagtatctgcatccagacgccctatttcctgccgaccgaggggctgaactccttgttgcaaacggcggcattgggcggtattgacgtacaattgatgctgcccgagcgttccgattcccggattatcgataaagccgtgcattcgttcatcgacgatatgctccgagccggggtgaaggtttacttttataccaaaggcttcctgcatgccaaaatgcttatcgtcgatgatctgctgacggttgtgggttctgcgaacatggatttccgcagtttcgagcacaacttcgaaatcaacgcgttcgtttacggacaggatttcaatacggcaatgcgtcgtgttttcgacgaagacctgcgctcgtgccggcggcttattccttcggaatggttgcggcgacctcttccgcagcgattgagcgagtcgttcatgcggctcttttccccgctgttgtaaggccggaggaggcgatgacggcgatcggggtttccgttgtcgtccgattcgcaaaaaacatagccacaccacggaaagcccggagcctgtaaaaaatatttggagaatccgatttaactttctatctttgtaaaacaaacgtatcagggttctgaccttcacgggtcgggattcttatttttttgataaaaccatggcaaaagagattatttatctgacggcagagggttacaagaagctcaaggacgaactcgaccatatgcgctcggtggagcgtccggctatatcggcggccattgccgaagcacgcgacaagggagacctgtcggaaaacgccgaatacgacgcggcccgggaagcacagggactgctcgaaatgcgtatcgccaaaatggaagataccattgccaatgcgcgtattatcgacgaatcgaaagtcgataagagcaaggtgcagatcttgagtcgggtaactcttctgaaccacaataccggcaaggaggtgatctatactatcgtcgccgagcacgaagccaacctgcgcgaaggcaagctggccatcggcactcccattgccaaagccctgctgggacataagaaaggggaccgggtggacgtgaccgtgcctgccgggacgatccatttcgaaattctggatatcaacatctgaaatagggagatcggggtgaggcaatctttttaggatgtagaaactgttgttgattattttttggtaaggaatgctttcgggcgttccttttttgttcgtatttgtatgattccggtgctttgtcagtcgataccggcgattgctgctatgtacggcggattgcatgcaaggggagttcggtgccatgatcgcgcaataaacggaacgtccgaccttaaggtcggacgttctctgttttctcgttttggaggagctattttaacgatgtgcgaattttgcctgtcgcatatccataagattgatatttgacaggccaccaccgatgagttctccggcggggcttgcaccctctttggtcagatttaccatttggcggataacgggtccatagttgccttctgcatccgctgctacgccacagatggtgttttcatcccaatagactgccagcaactgatctaccgcatccttaaattcaggtattccgtaagtaaccagattgttgattatgctgcggtccgaatattcgtccggattactcaaatcgcccatgaaacatcctgtccaccaatgagctgccttgtcgttgtgggatactttcaacaacagaacggcatattcttcgaagcctgcgaagttgatgggatccaattgggcgagttctgcgccatcataccatgcgtagctgtcgatgcttacttcggcaagcgcagcggtattctcttctaccgtatatgtttcactgatgatgaagggagcgacagggactcctttttgatcgatggcaacggcccacattcgcaattgatcgcctgtctgaagattccgttcaaattctacaggacctgtggccgcgagcatggaaaccgcctcggcatgcaggccggtggtgcccatatagtctttgattttggattcaagcacttttttcataccctcctcgatattttcgccgaaggcctgataatcctcttccgagataagatcgaatatgtaaacgacatcgtctgctgacggaacggtggagaacttggaggcgacaaccgaacttaaagtgcattcgaattgaacgtcgaacgtttggggatcccctccttcaagagtcttgaatgtttcggttttgatcggtgtggtcgggaatccctgttcgcatccgaaaaccgcaatttgatattcccagcccgggttgagttcttttgcttcatacgtgaaaggtccctcgtggagatacatgtcgagcataccccagccgaaataacgatcgatcagatatttttgataatccgtacccgtcggcacctgggactggatgtcagccgacagaacatccaggaagtaaacatcgctgttcgacggtgtaacggtaatcgatgctcctgtctgtgtgattgctgtcgttgcgatttcgaatgtattggtggattcgggtgcagtctgcgctgtaaaagcttctgcggtaggcttcgtcgtcgtgtgtccgtcggcatcgatacctactgcgacggcccaatacttggctcccggttcgagtcctctggccgtatatgcatcgttgccgtaagaagtaatggctttgaccgcctcctcgcgggtcatctcctgctgctccatcatcactacctcgatgaaatattgtaggtaatcgtcaaaaccgtgtttttgggattccagccaatcggcgtcggtgacgatatcactgaaataactttttgtttcgttgctcggagaaaccgtgatttcagctgtcgtcggagtaatgttacttactgataccttgaatgtcagttgattaggatcagtttggggggggtacgtcggttttgtcgtcactgcatgctccggcgaacaccgccaaaataagaaaaggaattaaaatttttttcataatcttattattttttagtgattaattcactactaaaataaataaaagtagtgagaaaacaaaaaacggatgattttttaggatgttaaatttaagttttttaaaattggattgatgtcttatgaagaggtaactttgtattcgtattctcggaactgccggaagtaaagaaaccggtcatagtaacttggggtatgatgctgttgtgatattatattgaccattcgaataaattcggagcctgtgtccgtttatacccgaggaaaagggtatgtttgggattcgagatattgatatttgattccctgcagaagcatcccaatatataggtatttgggagagtgcaccttgccgggtaaccttttttcattatttttgcacctgaaatgagcggacaaaaactcatacgggtattcaatgcgggggcgctgctgctgatcctgctcgcggcctatgcgggcaaaagcctgcatacccatcccgatgagtactatcgttacctcacggagaacgatgcaaataccacgtcgccggctcttgtggacgactgtgcgatttgccatttccatttcttctcgtatatccattctaccgactgggtcctcgacagtgagttccgtttgctggaaacctttttccggccggagtgttacgatccggcaatcgttgcgatatcgggctcgcagctccgtgcgccgcctgcaatcgggtagataaattcgttccggaaccattcgtttccgggactattcgaccgcacgtgccgatcggcgcggcaaaacatcgttttcacagggtattctctctcatcggccgtattacgggccgttgcccctacctggcgaaaacagacccattttacatcttaaaacataggattatattgtgtatccatttgggagcatagcgccccgagtccattccgaggaggagatttaggtggactccattacagacgcagccaccggccgcgaataaacgccctcgaactcgattccgcgaccgtcggataatgggacattgaagatataatcgcttaattattataatatgaaaaaattgatcctcttggccgtaatgtgcctggtttatcatacactttttgcagacgaaacgaccccgaaacctcaaagcgacgctcatctttacggtcatgtcatcgacagcgaaacaggcgaacatctgccgtatgttactgttacgatccccggcacgaccatcggtactgccaccgatgcgagcgggcactatttcctgaagaacttgccgacgggcacgattaccgtcgaagcccgaatgatgggttacgatcctgtgcgccatgaggtatcgctcaggaaaggacaatccctcgaactcaacttcgagatcacggaaaacggaatcaccatggacgacgtagtcgtttcggccagccgcagcgaaaccacgcgtcgcaaggccccggccctggtgaacgtcctcgaccgcaagattttcgacaacaccaactcggcttgtctggctcaggggcttagtttccagcccggcgtacgcgttgaggacgactgtcagaactgcggttttatgcaggtgcgtatcaacggactcgacggacactattcgcagattctcgtcgattcgcatcccgtcttttcggccctttcgggcgtttatggactggagcagattccggccagcatgatcgaccgcgtcgaggtgatgcgcggaggcggttcggcgctcttcggctcctcggccatcggcggcacgatcaacatcatcaccaaggatcccgaccgtaacagcgccgaagtcggccacacgatcacggcgatcggcaacagcagcagctacgacaacgtcacctcggccaatgcctcgctcatcaccgacagccgtaaggcgggactttatgtttatggtcagaaccgccaccgctcggtgtacgaccacgacggggacggcttcaccgagattccgcaactgcaatctcaggccctcggcctgcgttcgttcttcaaaaccagcgcttattcgcgtatcacgctccaatataataccgtcatggagtaccgtcggggcggcgaccggctcgacctgccgccgcacgaagcgatgatcgccgagcagaccgaccacaacatcaacggcggcagcctctcgttcgacctctcgtccgccgactactccaaccgtgtgaatgtctatgcttcgttccagcacatcgcccgcaagagctactacggttccaagcaggatcccgatgcctacggccgcacgcacgaccttaccgtggcgaccggcgcccagtacatccattcgttcgaccggttgtggttccttcccgctgacctgaccctgggcgtggaatacaactacaacgatctggacgacgaatcgatcggctacgattatcgaacgaagcaaaaggtgcacatcatcggcgcctacctgcaaaacgagtggaaaaacgagcattggtcgctgcttatcggcggccgtctggataagcacagcctcgtcgatcacgtaattttcagtccgcgtgccaacctgcgctacaatcccggagagggggcgagcctgcgcctgagctattcgagcggcttccgtgctccgcaggccttcgacgaggatatgcacatcgccatcgtgggcggcgagcgggtacgcattcggctggcggacgatctgcgcgaggagcgatcgcacagcctcagcctctcggcagacctttaccaccgtttcggaaaagtccagaccaacttgctcgtcgaaggtttttacacgacgctcgaccacgtttttgccctgcgtccgctgcccgatccggatacggacggaagtacgatcaaggagcgttataacggttcgggcgcccgcgtcatgggcatcaatatcgagggcaaggccgccttcacccgttggttcgacctgcaggccggaatcacccttcagcagagccgctacaagaagccggaacagtggagcgaagatccggaggtcgcaccgacccgcaagatgttccgcacgccgaacacctacggttaccttacggcccaactgactcccgtgcgtaatttgcaggcggccattaccggaacttacacgggcaagatgctcgtgcagcacatggcgggttcgggtacgcccgtcgatcgggccgtcacgacaccccgtttcttcgacctgaacctcaaagtgtcgtacgacgtcattctctataaggagatcgccctgcaactccatgccggtatccaaaatatcttcaacgcctaccagaaagatttcgatcggggggtcgaccgcgattcaggctacatctacggcccgtcgctgccccgtagttggttcgtcggcgcgaagatcagcttctgacggtctgccagaagctccggcggctccttgcttcgccggacagggaatatcgttgtcgctcatccggatcgacggcatacggaacttttttgaaaatatcgctttcggaaagtcatgatattttccggatataaaccgaacggagctgcctggcggctccgttcgctcatggcggccgaacgcctttaggaacatattgcatcgatttgcacgaaccgcaaaacaattttacggtttttctcgtttttaatatatcgatccatccgttaaaattcgtatttgctgcgatttttgttctgttctcgaaacaggggtgggttgaataaccgacatacgatccccataatcagatttaaccctgaatcgttatgtttaactcccgatcttccatctccatctcgacgtttctgtcttcactgattggatctatcgtgcgcgggcgacgctccgtccgctgcggccagacgtgcgaataccgcaaggccagactcatcctgacccacgacccgggcgaagagctgtttctgggggccctccatccggctgcggctcttttccgggaacatatcgacattcccgaactcatcgccgaacatgctacttaccgcagagtgctcgaggaggccggggcgagagtgctcacggtacgtcagatcctgctcgacggaaccggtgcggacgggaaacccgccgaccgaaccaagctggagaacctgcgccgcttcgcggccggttttctcaccttcgacacccagaacctctctccggaaacagccgggcagcagaaggagtaccgacaatccattctcgccaagacatcgcctcgggacttggttcgtatcattctgcgacaaccgatcatccggctgtcggaaacgcagatcaacacgggtctcaaggccgaatattccgaaaaccccgtgatgaacctcttctatacgcgggaccagttgataactactgccaaaggcgtcgtaatcggacgcatgaactccccgcagcgggagaaaggatgcgacattctgcaattctgcctcgaaaaaatcggcatgaaaccgttacaccgcatcgatggggagggagctcatctcgaaggcggggatttctatccgttcggcgatacggctttcatcggctgcgggatgcgcaccacgcaaccggccatcgatcagctcatggagcacgatttgctgggctgcaaccgtctggtcgtggtcaaggaccggttgttcagccaggcggaaatgcacttggacacctatttcaacattatagaccgcaatctggtgacgctcacagctcggcgtatgaccaccgatccggattctccggatctgttgctggccgatatttatctccgaggtgcaaacggcgtctataccaaaaccgaagaagatgtcggattcgtcgaattgttgaggagccgtatcggtgccgccatcatccccatttccgaagaggatgccgaccggctggcgggtaatttcctgacggtcgggtcgcgccgtatcatcggggtagcgggccagtccgaagccctgcggaccgaactgaaacaccgaggggtgaaggtcacctgggtcgggcttgacaacctttgcaaaggctacggtgccgcacactgcatgacgcaggtgcttcgcagacggtgaagactgtcctccgacgtatgtaaaaaagacactccggggaagtgaaaagtttttccgggagcgaccgttgtcgcaatgttccgaaagaatatggccgctgttgcccggcaaggagcgaaatcggctgttatgttccgttcatacgggtcagacgggaaactttccgcttccggatgcgggtaagtttcttatagaatacgacttacttccgacgaaatgtgcggcggaaggctctttcacgaaaaatccccggtcgaaagaccggggatctgctatcgttgtcggcaaacgcttacaacgccttgatctcgtgaagcacctggttggtcttgcggaccgcagcagccgatgcctcgaatttggcagcctcctccttggtgaggtcgagtttgacgatcttctcgatacccttgcggccgatcacggcgggaacaccgatacagatgtcgttctggccgtattcgccttcgaggtagcagcagcaggggacgatcttcttctgatcatgcaggatcgattcgaccatcatcgaagcagcggcgcccggagcataccaggccgaagtgccgatgagtttggtcagcgtggcaccgccgaccatcgtgctggcgacagcctcttcgagtttcttcttcgaggcgaattgcgtcacgggcacgccattgaccgaagccttcgaaagcagcggaatcatcgtcgtatcgccatgaccgccgatcaccatgccgtccacgttgttgatgttggcgccggtggctttcgccaggtaacatttgaaacgggccgaatccaaggcgccacccatgccgataatccggtttttgggaagtcccgaagccttgagcgccagataagtcagcgtatccatcgggttggcgaccacgatgatgatcgcgcggggcgaatatttcaccacgttctcgatcacacctttcataatgttggcgttggtgccgatcagctcctcgcgggtcatgcccggcttgcggggaatacccgaggtgatcaccaccacgtccgagttggcagtctgcttgtaatcgttggtcacgccgacgagcttcgtatcgaaatccatcagcgtagaacactggtacatatccagcatcttaccctccgacaggccctctttgatgtcgatgaggaccacttcgctcgccacttcgcggcaagccatcacattggcgcaagtagcgcctacggcgcccgcgcccacaactgttacctttgacataatgttatagttttaaggcgagtccgacgtattgatttcggatgtaaaacaaaaatactgtcacaacagaacacgtcggactcacgttacggtatcttttgatgccggattccatcctgacactccctgccgacacccgtcgaaaacgggaggctgcggggttctatttacatcgaacgaatattagccgatcaactctttgtactgcgcgtcggtaagcagcgactcgcactccttgggatcggtcagtttcactttgacgagccaaccctctccgtagggatcgcggttcacgatggagggatcgacatccactgcagggttgaactccaacacttcggcgccgacgggaatgaaagcgtcgctcacggtcttcacggcctcgatcgagccgaagacgtcaccggcggacaaggtttcgccgacggtcggaacatcgacgaatacgatgtcgcccaactggctctgtgcgaaatcggtaatgccgataaaagcctcaccgccctctacgcggcaccattcgtggtcattggaatacttcagatttgcaggtacgttcataattttcggtatttgaattggttaaaatgaaatttattcgcggtctaaaatatcattgcaaatataaggttatttttcgttcggccaacgttatcctgttatttttttaacacgcagcccgtcccgtccgttcgagccgtctgcttcccctcgataacgaactctatctcccggaacaggtacccttcggtacggccgtcgggcagctccaccagcagctcccccgaagggcgcacgccccgcagcacggcctccaccgtccggccgtcgggataacggtaccgatgccgctctccgagccggtacatccgccgccggtagtcggcctgcagcgcctcccgatcccctttctcgagttgttcgtaccgggcggccagacagtcgcccaagcggtgcagcacctcctgccgatcgtattcgcagccagtttcgaggcgcatcgacgacgggttcggcaacgacggatcgaaccgggtctgattgacgttcaccccgattccgacgatcgtacgcgacagacggtcgcccgtcaggttgtgttcgatcaggatgccgaccagcttgcggtcgcccgcatagatgtcgttcgtccatttgatccgggcgtcgatgccgtaaccgccgaaaaggtccgtcaaagccaaagccaccgcttccgaaagcagaaactgttccgaaacgggcaggaaacggggttcccataccagcgagaacatcaggttgcgtccctcctcgctgctccaggtatgcccccgctggccgcgtccggcggtctgccgctcggcgcagatcgcatcgccgtgttcgtagcgaggattccgggcctcgtcgttggtcgaggtcgtctcttcgagaaagtgataacgggtcttgtgcatccgaaaggtactataccgaaactccgaaatcccggagcgccgcggtgagtgaagttttcttgtcggtggactccttgcggcgtccgataatcagcgcacagggaacgccgtactccccggccgggaaacgcttggggtagctgcccggaatgaccaccgatccggcggggacgtatcccttgtactgtttgggttccgcctccgttacgtcgataatatgcgtcgatccggtaatcaccacgccggcgcccagcaccgattcgcggcagatgtgcgccccttcgaccacgatggcccgggagccgatgaaacagtcgtcctcgatgatgacgggggccgcctgcacgggttccagcacaccgcccacgcccacgccgccgctcaggtggacgcgctcgccgacctgggcgcaggagccgaccgtcgcccacgtatcgaccattgtgccggcaccgacccaggctccgatattgacgtaggagggcatcaggatcgcccccggcgaaatgtaagctccgtagcgggccacggcgtgcggcacgacccgtacgcccagctcttcgtagccgtgcttgaggtccattttgtcgtgccattcgagctctccggcccgcatggtgcgcatctcctgcatcggaaagtagagcagaatcgccttcttgacccactcgttgacctgccactggctccgagacggatcgatgggttcggccgttcgcaggcgtcccttgtccagttcttcgataacggcgcggaccgcctcccgcacacgggactccgcaagcaatgcccggtcgttccaggcctcttcgataatttgtcgcaactgattgtccattcctgtttttcgctttcgttattccggtttcaaagttacaaaattctcctgcggatcgccggatgccggcaactttttcgtatattctgcgaatatatggaatgttcggacaatctttgcgaacaaacctgcacgattgcgccggactttttgtatatttgtctttcgaaacccttcaaatactaaaatatgttaaaacacgttaaaattactttggcggttttctgtgccgctgctgcacttaccgcctgtaagtcatctatgaaaatcaaacacctgccttatcccgaggccgagcgtacggaagtcgtggataactacttcggcaccgaagtcgccgacccctaccgctggctcgaagacgaccgttcggaacagacggccgcctgggtcgctgccgaaaatgccgtgacgcagaattacctggatcaaattccgttccgcgaggcgatgcgtgcccgcctgaccgagctgtgggcttatccctgggagggagctccggctaaattcggggattattactatttttaccgcaacgacggacgacagaaccaggccgtgctgtaccgccaggcttcgctcgacgccgagccggaggtattcctcgatcccaacacgctctccgaggacggaacggttgcgctgtcgggcatctctttctcggaagatggccgctacctggcttatgcggcttcggcttcaggttcggactggagcgacattcatgtcatccgtacggcggacaagcaacccacgggcgatatcgtaaaatgggtgaagctctccaacgcagtgtggacacccgacgaaaagggattttattacagtacgttcgacgttccggaagcgggcgtctattcttcccagaaccaatatcagaaggtgtattatcacacgctcggtaagccccagtcttccgatcgtctgattcatatggacacacaacatccgttgcgctatttcgcttccagtgtcagcaaggacggcaagtggcttttcatcacggcatcggaaggtacgtcgggcagcgagatcctctaccgaaaaagcagcgataagaagttcaaggtgctgcttcccggctttgccaacgaccacgagattattcgcgccgagaacgataaactttacgtgcgtaccaacctcgatgctcccaactaccgcgtgatccgcatcgacctgaataatccttcggtgatcgaggagattatccccgaaaatccgaagaatatgcttgagatcgtcagcaaaccgggcgactatctgatggcttcctacctggaggatgcccaaagccaggtttaccagtacgactggaacggcaagctcattcggaaagtcgagctgcccgccatcggatcggcaggcggattctccggtaaaaaaggcgaaacggaggccttctattcgctgaccaacttcacgacaccttcgaccgtttaccgttacgacctcgcaacgggcgaatcgaccctgtataagcgtcccgaagtgaaattcaaccccgaagactacactacggaacaggtgttctacaccagcaaggacggcacgaaagtcccgatgttcatcgtctatcgcaacggactgaagctcgacggcaacaacccctgttacctctacgcttacggtgggttccaaatcagcctcgcgccctggttcaacccggctgccattatgttcatggaacagggaggcgtttattgcgtagccaacctgcgcggcggcctggaatacggagaagagtggcacaggggcggcatgctggacaaaaaacagaacgttttcgatgatttcatcgcagcggccgaatacctcattgccaacaaatatacctcgtcgaagaaactcgccatcgcgggcggttcgaacggcggcctgctggtgggtgcctgcgaagtgcagcgtcccgacctgttcggcgtctgcctgccggcggtcggcgtgatggatatgctccgctaccacaagttcaccatcggctggggctgggtcgtagagtacggctcgagcgacgacgaggagcagttcgactacctctacaaatactccccgctgcataacatcaagaagggcacgaagtatcctgcgacgctgataacgactgccgaccacgatgaccgtgtcgtgccggcccattcgttcaagttcgccgccgagatgcagtacgcccagggcggcgacgctccgatcctgatccgcatcgacaccaaggcgggccacggcgccggcaaacccgtctcgaagcgcatcgaagaggctaccgacgtgttctcgttcctgttcgagaatacggacacgccttacaagacggtcgaaacgaaataatgctattccggtcgcatgtccgaagcttcgctgaaaacggagtttcggaagcagccgggccgatcccgatgcggatccggaacccggcacgacgaagtaccggccgataaccatactgttttattgagcgatgaaagtttacaagttcggcggcgcatcggtccgcaacgcggacggtgtgcaaaacctgctgaagatcatcggtgacgaacgggatctgttcatcatcgtatcggcaatgggtaagaccacgaatgccttggagaaggttttcgaagggttgcagaagggcgacaaagccttctcgatggagcacatcaccgcgctgaggcaataccacgccgaaatcgtaaacgaactgtacggcgctccgacccggctcgagaagatcgaacggcttttcggggagctcgaacaggtggcgaccgaaacggtctatcgtccggaagacgccgagctgtggtacgacaccgtcgtcgctttcggcgagctgatctcgacgacgatcatttcggagtacctctccgaacggggtatcgacaattgctggctcgatatgcgacgctgcttccgcaccgaacagcgacacaaggacgcctcggtcgatatcgccgcatcgcggactctgctgcgcaacgccatgaaacagtcgaaggcccgtattttcatcgggcagggctttatcggaggtgctccggacggcacgaccacgaccctgggacgcgaaggttcggattactcggcagcggtggcggccaatatcctcgacgcggaatccatgtcggtatggaaagacgtggacggcatcctgaatgccgacccgaaggttttccccgatgcggtgcagatcgcggaactgaactacctggacaccatcgagctggcttacagcggggcacagatcatccatcccaagacgatcaaaccgctgcaaaacaagaacatcccgctctacgtgcggcctttcggggacaagcgaaaaccgggcacggtgattcgccgtatgtcggcgccgatcgaggttccgattctgatcctgaagaaggatcaggtattgctgacgatccgttcgcgggacttttccttcgtgctcgaagagaaattcgcggcgatcttctccctgctggagcgacaccgtatcaaggtcaatctggtgcataactcggcggtgaacctcagcctctgcgtggataactcctggcatatcgacgaggcgattcaagccctccgaaacgaggagttcgacgtaatgaaggtcgagaacatggagctgctcaccatccggggctataacggcgatttgatggagcgatatgcttcggggccggaggtttttctgttgcagagaactcaatcgacggcccgtattgtccggaaaaaccggtagtccaacttcgaaaaaagacgctaaaataaaagaagagaagtggggtcgatgttggacgaatacaagaaaaacattagaaaaccgaatccggaggagctacgactcattaagtttttggtacaaaaggcatctttgaatatgtccgagggctgggaaagatctttgactgtttcttgtttgaatgatggaggaatgggcagtatgaaattatatatgtctttaccgccgaaagaaataatatcaacgatttttgtcagtgagtgctcttttaaggattctgatggaatagatgtgttagcctcattatatctcgatcaagatcatgagatttgtgaagtggatatttggaaagctgatttttctcctttgataaggatctcttcggatattagcttataaaacggaggaacatgggagatttgggatattcgaagcatgcatttcgtgtaaatggtgaaacttattatcctggaaaattatgaaaaaattaataattttattgatcagtcttttcttcattgcctcctgtgccgttgtaaaatccagcagaatagttggaaaatgttacttgggttatccttatcgccagattatggtattcatttgtatgctgagttttatgccgatagtacgtttttatataggtcagctggctgttatgatataatcggccattggtacataagcggtgatacagtgattttatcttcgccaaatttcaatgtcgaaactcgtcctattgatctttatatttttgcagaagaagagattacagattggcgttttcctgatgagtattataaatttacggatatggagggtaatagagatgcatatattattaaaggagatactttatatcctgtactgaaaaacgggaagtctctaatagaatatttgtacgcaataccgaaaccgggccctgaattaggtctatataatagaggaatttattttgggccgaaaaaagataagtaatctttgattgttactgccggacttaatgtccggcagttttcttttgtagattggtgaattttatctatctttctacaaagaaaaaatgtaattatgaaacgactaataattttgttaatcggacttttctttattgtttcctgttgtagtgtcaggcccggcaaactgaccggtaaatggtttcgaagtacaacttgtgtagatgatgcaagaactcctggattatatgtttacttttatcctgatggcggctttttgtaccaaatggcctatgctgacggagctacaggtgcttggcgaatcgaaggcgatactgttattttatggtctccggatttcagtatcgtgttggatagtgttttgctgccgtacggcccacgctgttggcctaatttgaataaatatacagatgctacagatgataatagagatcgctaccttgttcgggggaataaactatatcccatcatgaaagatgggattaatgaacttcctcttgtaaaaatttcaaaaaaacaagcaaaaatagaactacaagattatccattttattacaatgtgaaagattaattaaagattgtctaacaaatccgtgaaattgaaagcccccccctgtcagagtgcattctgacagaggtgaaaatgttagaatcggacttgttaggcagcccgttttaatttttggcattttggtagtgcccgaacgcacgtttaccgtcgccgaaagccgcggacgatcgaaaaaatcgtttcggaggcaggaacctcgccctgctgtttcatccgccagatcgtacgtaccatataccgctcgatgtcccggtagagccgtttgaaaagagggcagtcctgataattctcgttgtcgagcagcacgtcccggatcgatcgctgggtattggtgtaattgctcatttcgtttttcagcgccacgccctcctttttcgaggcagtgattcgcgccgcagtcatctgacgcagtttttcgcatacggtttccagtagcaccatcaccacgttgtccatcaacgtgtgcccgtgcatatagagataggtcgtttcgggcgttaccccgagccgaccgagttgtgcggcgaaatcgtccaactccgccgcctgtttgggatgcttgctggcgagcgtttgctcgcggcgggcgacattgcgctgtaaccaggcgatcgtccgggccccgttatcctccaaatcgaggtagttgagccttaccgaagacttgaaatcgacaagagtgaacacatgctcgtccgacagcttcgccgaataggcataccagagaaaaagacggtaaatcgtgcgggaatagtcggccatgaagcgttcgaaatcgaagattcgggtatcgttcttggtcgccttgacgcagacgttgtgcagcgagggagcatagcagaggtaattctccgtggcataggtgtaagtatggaacatataccgtgagtcgcggatcaggcgcgattgctctgtcgctccgttgaacaggaaatcgaaatccgaatccacgcaaagcaacattctctccgacgattcgggaatcatcgacatcagcaccttcttgcctttgggcaggtctttgcgggtcggcaccgatatttcgaaatagaggtaaggattggagaaacagtcgaagacgccccgccagaaagccacgtcctcataaccttcgacgaagaccttcacgactcgcagcgacgggtcgcccggtagcggccggggcagcggaccgtcgtttttcctggcaaacggattgatccgccgcagtttatcggtgatttttctcatgtcgttttacaaaggtagtaaaaatgagggcagaataaacaaacttgtttgttttattctgccgaagtcaattatatttttcaatgcccctttatccgatggtcgcagcatcgaatccgcaggatgcttattcgcggcccgggccgtgtctgtaataccgacgttcccctgaattccctccttgggaggggacttaggaagctcggttctcaaagaggttcctaaagtacataatcacgttcgaaaaatatgttttgatttcatgctatctattacataaagtcgggaggaagtaatagtcatagcatcaggtctttcttttgcaatttcacggattttataaatcaagttgctaatttagctccgggagaatacttatacgaaaaaggagaatttcataaaatataaggaataagaaagtcgaaagagtcggattggatttccccgttcaataattatattttgatgttctgttttattactattattgttctatttcttgcattatgggcaagaaccgggtttatcagtctttaacttagctcgtaactatgagcatgcccggaaaccttctgattcccgaggcttatctatttggaccgttgaagtaaaaattatttgtcggaacaagcattgtgcgcatgtccgatcgattttgtcgggttggatgaacgagatcttaaaagaaaagaacgattgaaaggagtaatagtaatcgtagaaagagttgaaataggagatgatctggttgtattttagtaggttcgttaaaaaataacggttgttgtgcgttgtttcggagaaaatccttatatttgcatcgcgttgaatcccgaatgggaaacggacgcgatgcgcgaaggttgcgaaaggtagtttgagagagtggtgcggaaattttcttcttgtgaattttttgaaaaatttggaggaaagaaaataatggttacctttgcagtcccgagccatttttaacgggagcttagctcagctggttcagagcgtctgccttacaagcagagggtcgggggttcgaatccctcagctcccacaaaatcgaaaatcggatgaaagccactcaattttttgagtggcttttttattgctggttttacgagaaggtgttctttgagaagaggatctgcggaggaatgaatgtgatggcattggttttacgtaggatgtgaaaaagtaggattttttcgatgcttcggtttgttctaaacgaggattttagtattttatttatacatcaaaagtattaagtcgtttaatgcgaggaaatttcgtttaaaacatttgaacgcgtgcgggaatccgttcgtaccggtacggttttttggcacgtgttttgtttttctgaaggagccgggtcggagcaatagcccgattccggcgaggtttcttcatttatttaagtttgggttagtagtttaggagggtaacctccgaaggcggaaagcagtcgagaagactcctttccgtttttttgtgcctgctgaagaaggcaggcaggacgatttctgttagtgttatttttagaagacaaggtctgccggatattgggctatctgttcatggcaggggctgtggggcgctccggaaggttcgacgaactcttgccgggatacctttgttcggggacgtttggagcctatcgcattttgtagctgatccgggcagaagtttccgggcaggtcgtttcggcgattggggattgggtcgttttgccttcccttcctctttccttttgactgttggcgggcttcctcccggctgtccaggttgtcgggggaggagcgacgtcggggtgatttttgcgtgcagacggtgtcccggtcgctgctcggggtgtttcgggaatcggtcgtgaaacggctgaaattatccgggcaggtcgttattccgcttcgtttcgtggtttttcgcaaagaattttgcctttttcgggaaaaatttgtatcttcgtttcgattgtagggaaatgcggaccggtttttgcatctctcctaaatccccgggcggatgaagatttcgccgggtttggtttaataattaaaaagaaacaacgatatgtcgataacgaagttcaaaggacagccggtgcagattgccggtgaatttgtcaaggcaggagctgcggctcccgatttcgaattggtcaagaccgatctttccaccctttctctgaaggatttgcgtggaaagcaggtgatcctgaatatttttccgagcctcgatacgggcgtttgcgccgcgtcggtgcgtaagttcaacaaactcgcggcggagctgccgggaacggtcgtgctggccgtttcgaaagacctgcctttcgctcatgcgcgtttttgcacggtcgagggaatcgagaatgtcgttcccgtgtcggatttccggaaaacctcgttcgatgagagctacggcgtgctgatgaccgatggcccgttgaaagggttgctggctcgttcggtggtggtcatcgacggggacggcaaagtcgtctataccgaattggtgcccgagatcacgcaggagcccgattatgacaaggcgctcgctgcggtgaagagatagccgcgaggctgaaaatcgaaggaagccggccgtagcggatttttctgcgtcgcgctttgtcgcggaagtctttctgtcgtggacagatcgcgcctccggattcacgcaagacttgaacaggtgctttggtccgacttcttggaacagcgtcccgtcactatgtggcgggacgtcgtcgtttatttccataggggcttgccgcttttcgtatctttaattttgttgtggatattttgttccggcaaaacacaaatttatttgcttttgcgttcggttcgttcgcatcttggacgaagcctaagatactttcgttcggtaagatacgaatggggccgctttgccctcgcttatccgtatctttgcagaagataggatgcggttcggcaatctctgcgtgcaagcccgcacgattcctctctccttttcctatctttgacatagtcttagataggatgcgcctcggaaaacagggaccaagttcccgttttctctcgcctttcactatctttgacttcgcctggataaaatcggattccggttgtgtttgccccggctttttcgtattttgacttcgtcttagatacttcgcctcggcaaaatgcaaataaatttgcttttgcactcggcttatttgtatttttgtcttcgatagcggctgtttttacacgatatggagattgtttatcacataaaaccttttgcggaactttcggtgggggagctgcatgcggcagcttcgctgcgcgaacgggtcttctacctcgagcagcatgtcacgacgctcgatgccgatgagaaggatcccttttctttcttcctgtgggccgagtgcgaggggcagacggtcggatttctgcggatgattccgcgtgggattgcttatgccgaaccgtcgatcggacgcgtttgcgttgcccgaacgtaccgccgtcggggaatatgccggcagatggtgagccgggctatcggttacatggttcgggagtggcgggcggaagcgatccgcatttcggcccaaagctatttgatacccttttacgaatcatttggattcgaggtcgtatcggacgaatacctggaagcgggcattccgcataagaaaatgctgattcgcctggatcgggaacatgggcgagaagcgtgaagcctgcggtgaaagaaaccgtcgcacctgcttttcgccagccttgtaacgacaaagcgactgcgagcctgcgcgacgggaaataataccactttttatttttaactcgttattaaccatctttcgtatgtgcataaaacataccaagcgaaaaattttggaatcgtgtgcggagagaaaaacgataggggcgggcgaaacatttttatttttcgatccgaaatcggttcggtaacgggtggaatccgaaggcatggaagaatttatcgcttcgctgacgcaattttttaccgactggggttatgtcggtctttttctctcggctttcgtcgccgggagtatcctgccgttcagttccgaggtcgtgctggtgattctggtgcggatggggctcgatcctctgctctgtctgttcgctgccgcttcggggaatacgctcggcggtatgacctgctattggatcgggcatttgggcaagcgggactggattacccgttacctgcgggtcgagccggcgaaaatcgaccgggtttcccgttttctcgaagggaaaggggccttgttcgcttttttcacctttctgccctatgtcggcgaagccgtcgccatcgtactcggcctgatgcgcagcaatgtctggattacggccgttgcgatgttcgtcggcaaattgctccgttacgtggcgattgtggctgctttgcagggagtgctttcgtggttttgaggctgtcggctgccggaacttgcgtgcggcacggcgaacggcatatatcttgttgcgtcgagaatagatagacttggttatgaatcaaagaatccaaaaacaaaatatccgggagaaatattggcgctattcgctctatgtcattcttctggggctgggtacggttatttttgtagaactgattccctttctgggcggcctgttgggagcccttacgatttatgtactgctgcgcgggcagatgcgggcgctgacgatccgccataaattgcggcgtagcctggccgcttcgctgctgatcggtgaagccatcgtctgttttctgattccgctgtctctgctcgtgtggttgcttgtcgctaaattgcaggatgtgaccctcgatccctcgactgttattcagcccattcggaacctggcggagctgattcgagagcggatcggctataacttgctggacggggataatatcgccaaactggtggagctgctgcctcgggccgggcagtgggtattgcagagcatcggcagctttgcggtcaatgtggtggtgctgctgttcgttctctattttatgttgatcggcggtcgggagatggagagctatctacgcaagttcatcccttttaaccggacggttactcaggagtttacgcgcgaagtggtgatgatcgtccgttcgaatgcaatcggcattcccttgctcgcggtcatacagggggcggtcgctctggtcggctattggttgtgcggtgtgccgtgggcgctgttttggggcgtagtaacttgtgtcgctacgatcgttccgctgctcggaacggcgctcgtatggctgcctttggcggcttacctggggctgatcgggcattggggcgcagccgtcgggcttttggcgtatggggtggtggtcattacgcaggtcgataacctggcccgcttcgtcctgcagaaacggatggccgacacgcatcctctggtgacgattttcggcgtgattatcggcttgtcgcttttcggtttcatgggggtaatcttcggtccggtgcttctctccatctttattttctgtgcggatcttttcaaacggcgctatctcgatgaagctccgatgaacgaagtacttgcctcgcctgcggaacgttcgtcggaatccggcagggaatgaatttccggcagttctatcgctgtatgtgcagaaatcgcagcggcatcgctcccggcgcaggctgtttcgcgggttgcagtcgtttgcgaatccgaattgccggttggaactacggacgggggaaatgcctgcgtattgtttgcccgttacggcgaaggcgggaccgaggttgtcggcccgatctttttcggggaatgacaggatactcggtttgctgcgattcttgttaaaggacggggagggaataatcgtgtgacgaagcctctgtttttcggattattgttgttgcgggagcggtcgttggctgcggccggccgatttggagcgggggagttgcaaacggaggttgtccgtatgaggatttggccgggtatgcgtgttttacttgaaaccgaggtgtgattcatatgtccgtatcgtggaatccctggcacgggtgtcagcgtgtgagcgaaggttgccgggagtgttatgtttatcgtcaggatgctgcctggcaaaaggacggcgggcacgttgcgaaaacggcggccttcggcctccccgtgcgccgaagtcgggacggccggtggaaaattccggccggggagatggtgtttacctgttttacatcggactttctgcttgccgaggccgatgtctggcgccgtgaggcatgggagatgatccgtttgcggcgggacctgcattttatgtttttcaccaagcgtatcgaccggttgtccgagtgtctgcccggggactggggtgcaggatacgagcatgtgacgatcggttgcacggtggagaatcagcggatggccgattatcggctgccgattttccagaagttgccgattcgtcacaagattatcgtttgcgccccgctgataggtcccatagatttggccccgtatctcggaccggaaatcgaacaggtatctgtcggcggcgagtcgggtcccgaagcgcgtgtttgtgattatgcttgggtgctctccctgcgggatcagtgtgcggaacacgatgtttccttttgctttcaccagaccggggcgcgtttgctcaaggacggacgtctgtaccggattcggcggcagtttcagcatatgcaggctcggaaagccgggatcgattttaaggcaggagggtgatgttatgtgcacttgcataaaaaatccgacactgtcagcagtgccggattaaatttaggaaatggcattttccctgtgggaggttaaaaatccatttcgatcacgcgatgctgtttgtcgaacttgatctccattctgttgtcgagttttacctcggtgctgcgtgtatctctttcgatctgtacgatcttgttgtcgggatagttgtcggcgacgtacttggcgatcggtgcagggatgattccggtcggaacggcgctgtacttgcaatcgatgtcggtccactcgcccttgcggtcgaactcgatcttgtcgccgtttttgaacgcgatttcatagcttttccgaaaatcggattcttctttggcaaaagccacttttcgatccccgaaatatttcttgatgaactgctgtgctgtctggggcagttgcgaaacctgaatcggtttgtcgttgccggccgaggctgtcgtagccagtaccaacatacttacgaacaatactacgatttttttcatattttttacaattaaagttgtattgtttatccttgcaaaattgaggcctaattataaatttcgtttttgatgcaggccggcggtttcataaaaaagaggatcgctgaattttcagcaatcctcttttcttggggatgaatgcgattactccttgccggccaggggcgctgcctgcgtataagtgcgagtcgccagctccttgtcgagcatgaatacacccatcttatctcctgaaacgagtttgagcgagtcgatgattgtcgtggcgctctcttcttcctcgacctgttcgtcgatgaaccatttgagcatacttgccgttgcatggtctttctctgtaacagccatgtcgtacaggttgttgatcattgccgtaaccttcttttcatgagccagcgtatcttcgaaagcctcgagctggcttccccacgatgttctcacttcggcgatcggagccagcagaacctgtccgccgcgtgcgagcagatagttcatcagaatgcgggcgtgatcctgttcctcgcggaattggataaagaaccagttgccgaaacctttgaggcctttcgattccgcctcgaccgacatagacagatagagatatgccgaccacatttcggcattgatttgcgcattgagtgcgtcttgtaatttcttgctgatcataactattttgttaaattgttaaatttcctgtttttccgttattttccgcgaactcttccgcagctgtcgttcgtcgaaaatgtcgagcgaaacatttctctttttcggtcggagagtcccggaactccggttttgtcgttgcttcgtcaatcgctttaccctgcaaaaatagtgcaagtctaaaacgaggcggaaccggccattgcccggaggcttttactttatgcaaagataagcaaataacgtctatttcgtgcagattttttatacgattatttgatctcgacataggggaaaacaataaacgatgcccgactaaagtcgggcatcgtttgaaagtattttgtttgaaaaattagcagttttcgccgtcgtaagcccattttacatagatggaaccccacgtatatccgccgccgaacgacgccagaatcaggttgtcccctttgcagagagccgcttcgtattcatacaggcaaagcggaatcgtcgctgcggtcgtgttaccgttgcggtcgatattgatcatacatttctcgcgtcccaatcccatacgtttggccgtcgcgtcgatgatacgcaagttggcctgatggggtaccagatagcggatgtcctgggcggtcagatggtggcgttgcatcatctcctccgatacgttggccatgttcgatacggctgccttgaaaacggctggcccgtcctgggtgatcgtgtgccagttgttgcgcacggtttcttcggaagcgggatagcgcgagccgcctgctttcatatagaggtgttgttcgcccgaaccgtccgaatggaggatcgcatcgatgacgccgtaaccctctttgttgggttccagcaatacggccgctgcgccgtcgccgaaaatcggacaagtgttgcggtccttgtaatcgacgatcgaggacatcttgtcggcgccgacgacgattacttttttggcatagcccgtttcgatgaactgggaccctgtcgtcagggcgaacaggaagccgctgcatgcagcggaaatgtcgtaggcgaaagcgtttttacaaccggcctggtcggcgatcagattgcccgtcgaggggaaaaacatatccggggtaaccgtggcgcagatcacgatgtcgatctccagcggattaaccccggttttttccagcaggtctttgatggcgcgtgcgcccatataagatgtacccaacccctctcccttgaggatatggcgggttttgatgccgatacgtgtcatgatccactcgtcggaagtgtccaccattcggcttaattcgtcgttggtaagcagataatcaggcaggtaggcccctacacctgtaattgccgctgtaattttcttcattcggggagcggtttagtttttgaaagcattctgcaacttcgcggtcacgccggtttgggcgcaacgttcggtcgtaagaatcatatttttgattgccagcgccgaagaacatccgtgtccgatgactaccggggcattgacaccgagtaccggcgtgccgcccacgtattcgtagttcatatccctccagaacggagtttcggggattttaagcgctttgttaatccggaaaagcccctctacggttttcagcagcgtattgccgacaaaaccgtcgcagacgatcacgtcggccacctgccccgagaagaggtgagaaccttcgacgttgccgacgaagttgaactcttcggattctttcatcagttcataggccgccttgctttgggcgttgcctttggtttcctcctctccgatattcagtaccgcgacccggggattccggatcccgagcatagcctgggcgtaaatcgaaccgataatgccgtattgagccaatacttcgggcttgcaatcgacgttcagacctacgtcgagcagcaggactttcccgcccgtgacggtcggagcgaccgtggagatcgtgggacgtatcacgccttcgatcggcttgacggcctgcatcgaacccaccatcatcgctccggtgctgccggcgctggcgaagccgttgatgagtcctttggccagataaccgaacccgacgacgatgcttgaattggtcttttgctggaaggctttggccggatggtcgcccatttcgatcacctcggtcgtatgtacgatatcgaaccggtccgccgcacagttttccgctttcaggactgcccgaatccgatcctcgtcgccgaagagtacgatccggcattcgtcgccgattgcatcgacggccattacggcgcctttgactgctgcctccggggcgaaatcgcctcccatggcatctacaccaatctttaacataatctgagatttggttagtaaaatagattacgctctttcggctgaaaatccgaaagggacccggcggcggagattattccgccgctttcttctcgatagccagcttgccgcgatagaagccgcattcggggcatacccggtggtagagtaccgatgcgccgcagttcgagcaggttacgaccgtgggaacgactgctttgtagtgagttctacgcttgtcgcggcgggttgacgagattttgtgtttaggatgtgccattttgtattatcaattattagtttaatgtttcttgtctttttcttcctgctccatctgttgtttgatggcggacagttgttcggtccattgtccggagcccgaggcctctctttcccgctgttgcgtttcgttctcgatcgtttcgaactcctgctcggaaacgatgcggaagcgtcccaacatatccggatcgcactccccgtcggggtgcacccgctgatagggcagagaaaggacgatgctttcgtaaatatattgcgtcagatccacgaaatcttccgagggtgagagccacaaggtatctccgtcgtattcgcggacttcgtcggagaatttcaccagcaattctccttcgtaatcgatcggaacggaacaatcgcccagacagcgatcgcactccaccactacgctgccccggatcgaaatctcgaggcgaagctgacgtgccgcccgtaaaagattcaccttcacgtcgcagtgcccgcctttgatttcggtgttttcgaaaagccggaacaagtcgtcgcccgcttcgaagtcgaacgtatgttctccctccgagaggcctttccaggcgatggaatattttcgtgcggcgttcatttcgatacttccagtctgcaaagttatgaaaaaaacggaaaagtaccaaaggtttcgccggttttagcgactctccccgcagggatgtgtgccggaatgattccgagtgccgtctgccggcggtgtatccaggagagattgttgcccggatgtgtggaacatagcgataaaaaagttatatttgtcctgtgatgaaatccgttgaaaaatttacggtcgaaatccggagtggcttcgaccagtggtggcgttacaatgccgcgctgatgtgcggggcgttcgatgcctcgggtaaccggatcggctttgcctcggccgagagccgggtggctgagatggggagcaatctggaggcaccgccggaggggttggacctgcatcgcagtcttacgctcgaaaccgttccgtgcgagcgtatcgtgctctatatttatgtgatccctcatacgctgccccgcgacaacgaaatcgggggacatcctccgttcccgttgcaggtacggattcgctatggcgaccggactgtgctcgataaggagtattccatcaaccagtggggaggggcgtcgatcgagctcaaggtgtcgcagccgtgatgcgggcctgcggccgtaggccgatgcgtctatggccccaattttccgatctccgttctgaacctgttgcgatcgtaataaaagaggttctccaaaattttggagaacctctttttatccgtgtaacgagggattatttgttgttgtatgcggccatcttaccgatcagcataatgatcttgttcgaatagccccattcgttgtcgtaccacgaaacgagtttcataaagcgatcgttcagggcgataccggccttggcatcgaagatcgacgtacgggggtcgctcgtgaaatcggtcgaaaccacgtcgtcctcggtgtaacccaggatacccttgagttcgttctccgaagcgtgtttaacggcggctttcacctcgtcgtaagtcgctgccttttccaaacgcacggtcagatcgactaccgaaacgtcgagcgtcggaacgcggaacgacataccggtcagtttgcctgccagcgcggggattaccttgcctacggccttggctgcacccgtcgaagaggggatgatgttgccgatcgacgcacggccgccgcgccagtccttcatcgaaggaccatccacggtcttctgcgtggcagtagtcgcgtgtacggtcgtcatcagaccttcgatgatgccgaacttatcgttgatgaccttggccagcggagccaggcagttggtcgtgcacgatgcgttcgatacgatatcctggcctgcgtaggtatcggcgttcacgccgcatacgaacatcggggtatcgtctttcgagggggccgacataacgacgtatttggcgccggccttcaggtgggcctccgacttttcgcgggtcaggaacagaccggtcgattcaacgatgtattctgcgcctacttcgttccacttgaggttcgcgggatctttctctgcggttacgcggatctcgtgtccgttaaccaccagcttgtcgccctttacctcgaccgtaccgtcgaaacgaccgtgtaccgagtcgtatttgagcatgtaggccatataatcgaccggaatgaggtcgttgatgcctactacttcgatagtgtctgcgtgggtgcaggcagcccggaataccaaccggccgatgcgaccgaaaccgttgataccaactttgatctttgacatgacgtattttattttaggtaaatattcgttgtcgatttccctttcggaagaacaaaattatacactttatcctttataaacaaatatactcgcaaatatttcgccagaatacggcggaaggccggaaaactttccggccttccgatcatcaggcgtatcagttcgttattctccgtcgggagtcatctgtttggctcgtttggccatggccgaagcgaagacgaaatcgttcagctctctgttgcgggcgtgcagaatttcctctttggttccttcccaccacttgcgtccttcgtggatatagacgatcttctcgccgatctccatgaccgaattcatatcgtgggtgttgatgatcgtggtgatgccgtattcctgggtgatctcgtggatcaggttgtcgatcacgatcgaagtctgggggtcgaggcccgagttgggttcgtcgcagaagaggtatttgggattcagtacgatggcccgggcgatggccgcacgcttgatcataccgcccgacagttctgcggggtagaggtgattggctccgttgagccgcacgcgctggaggcagaaatcgacccgttccatcttctccttttcgctttgctcggtgaagaggtcgagcggaagcttgacgttctcctcgacggtcgaggagtcgagcagcgcaccgccctggaagagcatgccgatatcgcggcggatcgcctttcgctccttgaatccgagggccgtgaagtcgatgtcgtcgtaccagatactgccggaatcgacttcgtgcaggcccaccagacatttgagcagcaccgtcttgcccgagccgctcttgccgatcaccaggttggtcgtgccggtgtcgaactcgacgctgacgtcgtcgagaacgacgcgtccgtcgaaggatttcgagatatggtctgccttgatcatataagcaggatttgggtgagaatcaggttgaagatcatgatgacgatcgagctggccacgaccgccttggtcgaggcggcccccacttcgagcgagttgcctttggcgtagtagccgtagaaggctgaaatcgaggtgatgatgaaggcgaaaacggccattttgataagtgtgtaggtgatcgagtagggtcggaagtcgtacagcaggccctgcacgtagtcgtcgggaatcatgatgcccgtcagcgctgaaatcaggtagccgcccgcaataccgatcaggatactcaggatcgccaggaaggggaagaaaagcacggttgcgacgatcttcggcaggatcaggtacgacgccgaattgacacccatgatttccagggcgtcgatctgttcggtaatgcgcatcgtgccgatttcggaggcgatgctcgaccctaccttgccggccaggatcagggctacgaccgtcgaggagaactcgaggatcatcgtctcccgcgtggcgtagccgataatgtatttggggatgaacggcgattcgaggttgatcgacatctggagcgtgatgaccgcaccgatgaaaacggagatgatcgccgtcaggccgatcgagttcagtcccagcgactccatttcatagatgatgcgacggcggtagatcgcccgcttctccggccgggagaagaccttgcccatcaggataaagtaacggccgatcagttcgaagattttcagcataacgttttttactgcttgtccgggttgtttttgtcggtttctgttgcggggacttcttcgaattcgatgtagtcgcccacgtccttgcggacgcgtttttcaccggcacctttcgttttgcggatatggatttcgccttcgcgggcattgccggcaggaccgccggatcctccgggaccgaagctctgaccgccgaattgatcttccaggtctttccgcatgcggtaaattctccagcggaaggagagaaggaggataatggccagcacgaccaggcccaggagtgcatagagaacgaacatggcgataccgcccaataccgaaggggcaaagagcgccagcaggaagatcagcagacagaaaagcggattgcgccggatgaagccgacgattccgtcgatgattgctatcagtagattcattgattcagtgtcattgatataaggtgttgcaaaggtagtgaaaacgaggacagaataaaataaacgggtttattttttatgtcgagtggcttccggtcttcccgaaaggtagtgaaaacaccgatatccgccttctataaaggtagaaaaaatcggtcattcccggagaatcggtgtgatttctcgattaaaagtgctaattttgaagcctaaaatcaaatctgcatcggaatattatgttgttgaacaaacttactgccatttctcccgtggacggtcgctaccgaaatcaaacggagaaactggccgattatttttcggagtatgccctgattcgctaccgcattcgggtcgaggtcgaatatttcatcgccctgtgcgagttgccgctaccggaactggccgggggcgaaaagtcgaaattcgaagcgctgcgggcgctctacctcgatttctcggaggcggatgcgctgcgtgtcaaggagattgaagccacgaccaaccacgacgtcaaggcgatcgaatatattctgaaggagaagatggatgcgctcggcctttcggcctacaaggagttcgtgcatttcggcctcacttcgcaggacatcaacaacacctccattccgctgactatcaaggatgcgctcgcggaggtttacttccccgcagcggccgaggtgcttgaccggcttcgggagatggcccgcgaatggcacgacgtaccgatgttggcccgtacgcacggccagcctgcgtcgcccacccgtttgggtaaggagatgctggtcttcgtcgagcggcttgagaagcagttggcgcaactgcgcacgctgcccgtgcctgccaagttcggcggtgcgacgggcaatttcaacgcgcatcacgtagcttatcctgcggtggattgggtggcttttgccaatggatttgtgaacgaccgcctggggctggagcgttcgcaatatacgacccagatcgagcattacgacaacctggcggcgattttcgataacctcaaacgcatcgacaccgtgctgatcgacctctgccgcgatatgtggatgtatatttcgatggagtatttcaagcagcggatcaaggccggcgaggtgggttcgagcgcgatgcctcataaagtgaatccgatcgacttcgagaatgccgaggggaacttcggtatcgccaatgcgatttacgaacatcttgcctcgaagctgcccttgtcgcgtttgcagcgcgatctgaccgattcgaccgtgttgcgcaacgtcggcgtgccgatggcccattcgctcatcggcctgcggtcgctgctcaaggggctcaataagctgctcctgaaccgcgaggcgctcgactgcgatttggaaaacaactgggcggtcgtggccgaaggtatccagaccgtgctgcgccgggcgggttatccttcgccttacgaagcgctcaaggcgcttacacgcaccaacgcacacattacgcgggaatcgatcgccgagttcatcgaatcgctcgacgtggccgagagtgtgaagcaggagttgcgggcaatcactccgcaaagctatacgggagtattcgaatagccgttcagctggaaaggaaatcaattcaccataacaaggagtcctcgttttcggggattccttttttatcttggcaactttgtatgaggtgcggttttatcccggatctgtttcgtgtgtcgaaacgttgtcgggagaggcgattgtctgtcgcttgccgtggcgattatagtcatgaccttctctgaattttcttttcgaagggaatcttcggatacaatgcggattccgaattattttttggcattgtctttgtaataatctattcaattataaaaaagactgattgtgagaactgtattgagatttttatttcctgcgaaaagttgttctgcgaaggcatcgggcattttgttggcatcccgcatgattttcggcggactgttgttttcgcatggcattgccaagtggagtaatttcgatacgatgtccacgatgttccccgatccgctcgggatcggcagcagtgcttcgctgtcgctggcaatcttcggcgaagtgatctgttctctgggatttatcgtcggtgcgttttaccggctggcattgatcccgatgatctttaccatgtgcattgcatttttcgttattcacggcgcagatccgtttgcggtgaaagagctggcactggtttatctggcgattttcgtcttgatgtatattgcgggtcccggaaattattcggtggaccgtttgatcgctaaaaaaatcggcggcgggaaatagcggccgaatcggtgcaatgatgccgaatttttatcattagttaatcaataagatctcgggcggccaggctgccgttgttgcaaatgcacgttggatgctgcatattgccgataagtgccaatatccatttgattcgatgcgggaaggcgaaaggtgccgatgcagggcgcctttcgctgtattcgtacccgttgttcgtccggggtttcgagtttgttcgacgctgttcgggcagcttgcgcccgttaaatggaaaaatatctgttcggggtcgataattgtgtgaatacccggttgtcgaattgattttttaatatatttgatgtagtctgaaggtatttaattgactacaaatagattaaaagaaactcgcatgagaataggcaacggataagaaattggtaaagtgctttgatacactatatttctcatgctgtcaaacaactcttatttgtttgcaaatataatattattgcaggtaataatcaaaaataacgaggtttattttcatttttacctgctgatatttgttccggattatcagatgcgatatatttgtaattaggattcgtaccgtgttccaagcggttcataagtaacgacttgcggagttttggcaacaaggggatgcggctccgttttatagaaatgacttatgcaaaccgacttatccatttacaacagtcttcgcccttcctttatagaaggcgttcacgccgtgaagttcaatgctttgtcggcggtcatatcgcgttaccgggattatgcccgcagttccgaacaaataaaagcgtactcgggagattctcttctgatgcgggacatcgcctccttgcttgacgaagcaccccgtcccataacgagggaataccaggatttcaccccgttcctgcttcttctgatgctttcggaggagtttcatgccgtccattacgtcgagcgtcttgtaacgtggtatttcggctactgttgtgtcgatgaactgcggacggtctgcaccattctgtccgagtgttcctacccgcatcacgacacgctgcggctgcggttcaagaattacctgcgtgaagcccgtaagacattgggtatgcccgttgaatgtaacgctgctgtcatgctgaaaatgctcgacgcctcttatgaacatctcactcccgccgatgtcggggagttcgaggagctgttgcacctgggggacgattacgagttcatctcccgtgtcaaatcgaattatcttgcctcggataacgtcacggaactcgccggggtttgcgggtattccagcacgattaccttccgccggcgtttccagcgggttttcggctgctcggcctcctcgtggttgcgtcagcgccgtatcgaacgtatcggggagttgctgcggacgacacactacacgttgcaggaaatagcctacatgtgcggtttctccgcccaatcccactttacggacttttgcaagcggaatatggggagcaatcccacttccatccgtcaggaaagccggatttgacattaaaatcggctccgtgataaaaaaacgaagagaaagataaaaatcgtaatccgccggtttttcgattcgctaactttatacgcgaaagtaacaagacggattatgattgcatttatagaaaaattaaacagcgaagtcctgcggagtatcgaacgtatcgaatcgcgggataccgacgtgttgaaaaagtcgcttgaagcgtcacgtgtcctgggagaagcgttcgaccgtttgaaacaatatatcatcggctaccgttttcaaaacgatgacgaggaaataaagttcttcaaagaaatcaaaccccgtcttttttgccgtctgatctattaccgcaagctctacaatatcgagatgaaccgtccggtaggaagtatcgaggcacaacgggagtacctggacgcccatgttcgggccatcaacgcgtacacgcagaaacgcctcgactttatccgctatttccgcagcggcgccacacacctggacagcctctatttcctgcgcgggcagaccgacacggagcaatacctggaaaccttctactataaactcgacccgcagttttcgacaaacgcggatttcaaggtggcgaaaatcctggccaacgatatgttgtcggtttatcttatgggcgaattggaatcactggagagcacgaacctccggaacatggttctgccattgtctgacgtgcgtccgacatggcaggactcgaagacggatctgacggaacttatttacctgctcgacagtaaaggctgtttcggcaatgtgccactcacgcaacttgccagctacatttccaacgctttcaacgtacacctcgacatgaacctttcgaggacattctgcgatatgaaaatccgaaacaacccgacaccgtggcttgacaaggcgaaagaggccctgcttaaacgtatgcagacgtggaagcgaaacaagaaaaacggcaattccgagtagaatatgaaccggtaaagcactctattccttatagaaacactgataatcagcgttgtatataacaaaagaaccgaggtcggttttcccccgtaactctcgaaaggaactttcccgaacgcccgtatttgcacccgtataaggagccgatacgggtgttccgttgtagccccgtccggattagaacaccgttaagcgttgaatcacagtattctatcgcatttctgcccataaaaataccgagtacgggccgcggatttcggtaaaaaacactgccttcttcaccgcatgaaccgttgagaatcagttcactgcaaattatcaaaaaaaagtcgtaccgacctcgttttaagctgtccatataagcccgacctttgtaacagactaaaaaacaaaggagtatgaaaatcatagtgatcggttcgcgagcctataacgagcttgtcgggcgtatagagaaaatagaggctgcaatcgcctctctccctgaaaaggggcgtgcatggaataaggagtatataaacgacgaatggatggacggtgagcaggtctgccgttacctgggtatcagcgggcgtacccttcaacgcctccgctcggatcacgtgatcacctattcggccatcaaccggaagctgtattattccctcacggaaatccgccgtgtgctgaaggagcgttccgtgcggcgcaaaaaccgaccaaaggaataggccatgtttctggacaaggaatatttcgacggatggatgcagcggctctcggaacggctggaacgtatcgagaagctgtgcgcgggggacgtggagcaaccgctttccatcctgcctgacggggagcgtcttctggacaattacgacctgtgccgtatgctcaatatcagcaagcgcacactccagcgttaccgcacctcgggagagctgccttacgagatgatctatcacaagaccttctaccgggaatcggacgtcctgcggttcatcgagcgtaacttcagtaatttccgtaagctgaaaaaggatcgtcctgccggttccggttaggccctgtcccgagagtccggcgtcatggaaaaacgcggagatacatggaataaggcacgacaaggcggtacaaccgctcgatatttgccgtaaaatcagtatgtttgcacttggaagcctatataataatgaagcaatgaaagaaactgataaaatatatcctgccgacaaaggggaggaagagctgctgcataacgtgcgccatatcttgcaggaagcgcgcgcgaaggtgatacatcatgtcaattcgaccctcgtgagggcttactggcaggtagggaaatatatagtggagtacgagcagcagggaaccggccgtgccggatatggcaaggctgtcatcaacaccctttccaggcggctcgtggcggagttcggaaacgggttcacggccaccaacctgcggtacatgaggcagttttaccagtgctacccgaaatatcacacgctgtgtgataaattgagttggtcgcattgccgcacgcttctcaaggtgtcgggcgatgccgcccgtgatttttacctgcacgagtgcgtcaaggaaaactggagtgtccggcagctcgaccgccaaatcaacacgcttttctatgaccgcctgctggccagccgagacaagaaagccgtgaaagaggagatttcccgtaccgaacccggacgtgtcgaacccaaagagatcatccgcgacccgtatatcctggagtttctcggtatcccgcagggagagcattttctggaaaccgatctggagcaactgctcatcagccgcttgcagcgcttgatgctcgaactcgggaaaggcttcgccttcgtcgcgcgacagaagcgtatctccttcgatgacaagcatttctacatcgacctggtcttttacaattacctggcccgttgtttcgttttaatagaccttaaatccggggagctgacccatcaggatttggggcagatgcagatgtatgtcaattactacacccgtgagttgatgaatcccggggataaccctccggtgggtatcgtcctctgcgcggagaaaaacgacgcggtcgtccgttatacgctgcccgaagatgaaaagcaggtcttcgccgcccagtacatgacctatcttcccacgcaggaggagctgcaaacactcttgcaggaagtgtgacgacaacgctcacggacatatgaaaaaagccgatggaaatctgtacttccgtcggcttttcgtttacatcttgatccctttcttcgcggggccgttctccggcgggctgcccacgcccgcgatcacgatgcgccccccggaggcgtcggcaatctgccgcagccgggaaggaatacgggccgccgtgttgtctttccccgggagctcttccgccgtgtcatgccgctcccggcacacgtcgttatcctcctccgcctcctttccctcgctctcctctatcggtttgaggctttgctgtatcctgcggtctatttccgtcaggtcagctttcagggccgtcagttcgggttccttgcgccaggaactttccaccacttcccgcaggacgggaatatctttctccagttcctcattctttttccggaatttttccagtgtcggctcgatggttgcgagcgcgtggatgaagttcatcgccgccagtcgcgggtcggaggcgatattcccgtagttgtactggtagagataatccccttcaccccggacataaaaacggttctgcaccaggtcgagcccgtctttcccggtcgtttcgctctggacgagcagctcgaacccgtagaggctcccgataggttcgagcctgtcgagcgtgcgtgccgtttcggcgatacggttgagctgtttcccgatgagcttggggtcggaggtttccagcccgttcagtttcacgggattgcggtacgagccgtcctcattgaactcgacgcgggccttgaagtgttccagatccttgccgatacgccgtatcaggtcgttgttcttctctatcttttccgtgatctgctccagcttgtagcggctcgatgatttgccgcgcacgaatgcctggcgttcgctttcgagcgtggcgatcttcttctccaggcgggccttgtccagcaggtctgtatttcccgagaggacggcgacatactcggaaaaattcatgccgctcttctcgtcgatggccccctcgtcgatggtacggcttcccatgttgttggtcttgagctggcggatgaacagttgcttgttgtgcaacagcccgaacttgtaggcgtcgagcgacttctcgacggcgtataatatcacgtccaccttgttgtcggcatggagtttggcgatctcgttcccggtgcgtattccccgcccgtcgcgctgttccaggtcgctgggacgccaggggcagtccaggtggtgtatcgccacgcagcgtttctgcgcgttcactcccgtcccgagcatctcggtcgatccgaagagtacgcggatttttccggtgttcataccggcgatcatctccttgcgcgctttttccgaggtcgcctcctggatgaaccgcacctcgctttggggtatgccgtaatcctccgcaagtttacgccgtatctcggaatagacgttccaccccgctccgggtttgtaggttcccaggtcggaaaatacgaactgcgtacctttgtacgcctcgaaacggcggtagtaaccggcaatcatacgggcgcagtggctcgccttgttgtccacgtggtcactgtatagttcggggtctatcatacgcatatcgagcgacatcttgcgggcgtagtctgtggcaatgagcattttcgccttttcctcccgctccgagagcggcaggcggcccaggagcgtggcatcgcccgatttggcgaactgcaccagccgttctatgaactccgtctgctggggtgtcggcgggatattgtgcaatatctcgttcttttgcggtcggtcgatccctatatcctccgccgagcggtaatctgtaatctcggagtagaacatggccagttcgggaaccttgatgaaatatcggaaccgttctttctgcacgacctcgttggtcacggaaaactcgtagtcgatggttttcttggcaaaaatggccgcccaggcatcgaaggtgcggatattctgacgctccagttccttcgggcgcaggtacttgaaaagcaggtacagttccgtgagcgagttggagatggtcgttcccgagaggaacgtcgcccccaggtcgcggcccgtgcgctgctgtatggtacgcagcgcgaaaagcatgttgagcgcccgctgcgacccctcgggatttccgaggcccgccacccggtcatgccgggtcgtgaaagtcaggttcttgaatttgtggctctcgtccacgtagaggtggtcgatacccatgaggcggaagtccacggcgtcgtccttgcgtgtttccagcgcgtgcgccaccttctgcaacttggcttccaggttggccttgcgtttctgacaccctttcatcatggcgcgggaaacgtccctgccttgtgctttgagcacttcgaggttctcctccacacagtccagctcggcctgcaatatctcctgctgtatctccggagactggggtatcatgccgaactgttcgtgcgagaggatcacggcgtcccagtcgttgttgcgtatctcccggaagatgcgctcacgcttccggggcgtgaaatcctccttgcccgggtagaggactttggccatcgggtaagcggtgcagaacgtccgggctatttcatggatgttggctttcagcccgataatcatgggtttgttggccagtccgaggcgtttcttctcgtaggccccgcagcacatgatgagggtctttccgccgcccacctcgtggtcgattatcccgccgccgagcagtttgtccatccatatcgcgtccttctggctgtcatacagattgtctattcccagccccttgaggtcgaggtcggggaattcctggtgcgtcccgtcgtacttcgggcgcacgtaacagttgaaagtacggttatagaggtctgtcaggcggtctttgaagtcggacgactgctcgcgcagccattcggggaaagcaccccggatctcgtctatcttgctgttggcgagctgtatggcctccccgtcacgcactttgacctcccgccgttcgccgtccacccatttgaggacggtcttggtgatgtcgggcgaagtgttttgcagggcgtgtttcaaaaggtgcaggccgttgtacttacgggtctgcgcgctgacggcatactgctccgtgatcttcacgttcgtcgcttccgccttcacgccgtactcgtccaggttagaggcgaaggtgatcttcacctccgtatcgaagagcgaggaggcgaaacgctcgtaaataccttttggaatccaccgttcgcccaggttgaagtccaggtcgtcgaaagcgatgggtttgggtgtcgcctcgcgcagagcctccagcgattcccgggccggggcgtggtcgggattctcccgcaggaacgcctcgatccgttcggctttcccgatgacattgccggcgatgaacttgtcggcaacctcgtagccgtccgtttccgggttgtaatagatacgtcctttcagttccccgagtattccctccacggtagttcccgtgagcgatgccatgtagcgaggttccacccggccgtacttgttcaggctggccacaagggcctccgaagcgtcgtcggcgtgcgtgatctcatcgggattgaaggccacgggacgctcgaagatgtcggctttgcgtgccttgccgtcgatgtaacgctccagcgatagaatctccgttccccgcgcgtccatcttgatcaggtcgaggttgcgtttgtcattgagccgtccgaagcgttcggtgaaattgtcgtaaagccggttgagcatctcccgcagggcggggttcgccgtcagcgtttccgcctcgttgttataaaggtggtaataggcatcgcgtatctcgatatacatggaggctttcgtccgttgtgcaggcgtgagttccagcgggtggaacatgggttgcagggattcaatcccccgcaggtagccgacccggttttgtccgtccgtgacgagtgtcccctcgcggaaatagggggcgacctcaccctcgaacgggcggggtttcatatccgcctcccgtatctgcggcatttctttaccgggttcttcctcctccggattttccgacgtgtcgaacaagctgcccgttctcggcgtaccggcggcttgtttccgtctgtctttcggggcttccgtcggggggcgtaccgcctgccgttcccgctgttccggggtttcctgctgccgggcgctttgtcggcgcagttccgccctccgttccggggtaagcgacatcatcatctcgtaaaagccgttgatcggcgggttatcctcccagttcagggaggcatacaagtcttcgggatcacgctccggtggcgtcgctttcggcatttcgctcttctgttcctccggagaggaggccggggcgaataacgagggttgccggggcgtcttccgctttgctccccggcggctgttccttttcttggatataccgagttctgcctgccgccgctcctcggcgctgaagccgaacaggtcgtagagcgtcagcaacggttcctgctgcacgtttaccggttcggcagccgccgtttccaccgtgtcgaaaagcgacccggcgaagccctcccgcggtttcggttccgttgttccgcccacgtgctgcacgggagtatccgccatgccgaaatcttcgggtttcggcgggtgctgctcccacaagcgattctcccgctccttcgaccaggccccgaagtcggccagatcctcttcggtcggttctccggcgggtgtggcggcagaatccggtaacacttgtccgggtttgttttcgattcgggtaatctccccggtttcggtatcgacatggtagccctgcgccgccatttctgcgacgacgcggcgtttttcctcctcttcccgctgctgctgaaggttacgggcgtcggcgataatctccttgacgatttctccggcaaggcggggctcgtatctttcggcacgctggcgttccgcctgacgggaacgggacaattcccgctccggtgtaccgggtgtctgttccggagcatgttccaggcaataactctcgttgaaatgccggttgaaatcctccgagagcatacgccgcatctcccggtcgatgccgtccacgccctccgcgtgggtgaactccatcgccggtttgccgtaggggtctttgcctactttggcctcggtatggatcactctgtcgaacgactggaaaaggttgtttatccggatgccgttcgacagcttgcgggattcgatgaaatcccgctgccgttcggacagttcccccgtggcggctttcttttgcaggataaccaggtcgctgccgacctccgtccccgcgtgttctgtaaagaggttgttcggcagccggatggccgatacgggctcgcagcggttcatcagccactcgcgcacggggcgtccctgctcggcgttcaatactccctgcgaggtgatgaatgccaccaggccgccctcgcgtaccatatcgacggacttcatgaaaaaatagttgtgcagcgcccgtgtgccttgccgccgcacggggtcggtatgggtggagaagaacgggtcgaagagcgccacgtccccgaaagggatgttgctcacggctacgtcgtagtaaccggcgtatttgggttcgatgcgctcgaatccctgtacccgcacctgtttttcggggtgcaggtgcttcaggatcaaccccgtggcggggtctttctcgaagcaggtgatctccgcgtaggggtcgtggaaatccacggcattgacgaaaacccccgttcccgcgctggggtcaagaatacgtttgggggcgatccgcgtgtcccatatcgcctccacgatggcgtctgccactttcgggggcgtgtaaaaagccgtcaggacggagttcttgatcccgtccatgtagcgcttgtattcccgttcgtcgggggtgttcgccctgatgacctcttgcaactcggccacgagcgttgccatgccgtccttgtccggtttcccggtggggttttccagcacttccttgatggcgccgaagccgctgtatgcgccgagtgtcctttcttcttcgggagtcggcgcccgccgttccctgtcgagcgtgaaggccgtcttcagcgcgtcgatattctggcggaggtgggttttcttattgaatgccatcttcgagaagtatttggacggttcccgtcagttcggtatagaacagttcgtagtcgggcgtgtcggcgaagtcgtccgtgaggtcgtacttctccagcactccgcggcagaggggcagcaggcgtagagccgcctgccgggcggtatcctcgggaatctccgcctcgaattccctccagaggatgtttaccagcgtgttgtagggtgaaaagtgcagtccgcggtagagttcctcgcgggcaatttcttcggcctcgatgtggttgcagcccgaacggatcgcctcgctgtacgcttgggcggcgctgtcggcccgctcggcgatgaattcaccttcggcgatgagttccgggtggctgtccttgaggtaggatagtaacgaaagtccgtaataggacaattcccccgtgggggtatggtgttgcttgtctggcatgataagaatttttagtggtcgttgataatcggggaagagaaaggcgccccgggttcccacccgaagcgccgaccactgaaaaaatccttatcaaacaagcgtatctcgttatgacaggtcttttccagtggcaaaggtaacgattatttccgtttgttcctctttccctgcctgggagtatcgcgtggctcgaaaacgaacgaggtcttgaactggtcatcgagcgtgagggccgcgtcgaacgtcccgccgccgtttttgacgaatcctcggatcgtgccggttttgcctttggtcagcagttccgcgagctgcttgtcggtcagctccttgcgggccacggttctccatacggtcaggccgcaatcgggattctgacacttggcgagtttgggatagaacaccacgggcctgccgcaacgcgggcaggctgtgtcactctccgcgccgtcgattcttgcttccagcagttctttggcgatttgcgaggcgaagacttcgataccgcgatggaacgtcggggcgtccatctccccggtagcgatcttcgagagggccagttcccagccgcccgtcatggcgacatcggcgatcttcttgtccctgaccacggcatacacggccagtcccttgtccgtgggtacaagcgactttttctctcgcctgacatactcgcgggcaaagagcgtttcgatgatggcggcacgggtggcgggcgtgccgatgccggcatccttcatcgcctcgcgttcggcctcgtcggacagttcgcgtccggcggtttccatcgccgccagcaggctcgattccgtgtgaagggggcgcggccgggtctgtttctgttccgtgccgcatcctttgacgggcagctcgtcgccttgtacgatgtcgggaaggagggtcatgtcctcctctttctcctcgacaggttcattcaggacggcccgccagcccgtctcgaccatgatactgccgcgggccgtgaaatcatgccccgcgctttgcagggtaagggaagtgttttctttcacgcaggccccggaaaaggtttcgagcatccgccccgcgaccatctcatagacgatgcggtggtcggcatccagttcggaagggaggttctcggtgggaagcagcgcgtggtggtcggcgatcttttcgttgtccacgcttcggcgggagagagatgcggtatccatcctgctcgcgtattccgcgaaacggggatagcgtgtcatgttcccgatgagtgccggaatctcctcggccacatcttccgatatatagcgtgagccggtacggggataagtgatgaacttcttctcgtaaagcgactgggcgatgtcgagcgttttttctgccgaaaaaccataccggctgttggcctctttctggagtgtcgtcaggtcgtacaagagaggcggctgttccctggtctccttgcgctccacgttcacgacgcgtaccgttcgggcgccgataacctcggcgcgggctgcttccgccttctccctgccgtcgaatttctccgtggagaggacggtgaactccgtgccctcctttgccgtggaaagcttcagccggaaataggtggcgggcttgaacgccttgttctccaggtaacgggagcagatgatcgccagcgtgggggtctgcacccgtccgagcgaccagacaccccgcccggcagccacagcaagcgcttgcgaggcgttgataccgacgatccagtcggcttcgctgcgggctttggccgagaggtaaaggttgtcgtattcgttgccggggcgaaggtgttgtaacccctcgcggatggcccggtcggtcaggctgctgatccataaccgcacgaaaggggtacggcattccaggtaagagtagatgtagcggaagatcagctccccttcacgccccgcgtcggtcgcgacgatgatgcgctcggccatgccgaacaattcccggagaataccgagctgcttcacgacacccgggtcggccttatactctttaccctcccgaacctgccggggcaggaggatgaacgatgatggcaggataggcaggttttcccggcggaaacccgcgatgccatactgttggggcattgccagcccgaccaggtggccgaaggcccaggttacggcatagccgtttccctctataaaaccgtctttacggttcgtggctcccacgatggcggcgatctcacgcgccaccgagggcttttctgcgataataacttgcatgatgattcggatttttcagtggttgttttcttgtagttcttctttctctttttccggacgggcgatcagccggcggtcgtaatagacatggttgctgttcccgtcgtaatactgccgtccgtcgtctgcctcctccggggggctgcgtttacccggccggaggtataaggcggccagcgctgcgatcaggagcggcatggctccggtctgcatgtagaaccatttcatacgttataccttgacacctttggagttgctctttttgcagctgcggtaatttctcctttgcgccggagtggcctcctgctgtccctgcttgagcggctctttcacacctttgaccgcttcgacggtcttgccctcggaattgacggcgacctgggtacggctttcaacggcgggtttgacctccgctccctgccgtttcgcacggtcgggattccagcggaagaagtccatcttgttacgctcgaagttgggcttgacccaggcgttgaacggctcaccctgcccgtccttgaccatgcccttgatgtagaaagccttgacatccgcccgcttggaggggtcgttcaccgcttccgtccactggtcataagcctctttgggcacggaggctttgaggattgtccggtgaatcgtgagtgtgggctgtcgttcggaggccgtagtttcctgccgtccgtttttctcggcggccttctggcggtaaatctccttgttctcctgggcgtagcggttgcgatccaaaccgtcgtaggtaaaggaatagttacgttcggccgcgtcgatttggatataggcatcccgcttataacccgcgcgggtggtatatccttcgagcaacaccttgccgccgccgtagaaatccatctgcttgccttccgagaggtcggcctccttgatacgggcacgtttttcgagtagcgaaacgggcatgggttccagagtgttcgtccatttgtctatcgacacgtagcagggcgtgagcttgcccggctccagctccaggtcgatcactttcccggcatgacgggtgttcatcaggttcgttttcgcctcctcatcgagcagcaccccgtggaagggggcgtcgaggtcgggccgttcctgccagtaatgcggcacgacgcgcagcgagccgtccgcctgctcttcgagcgacacgcgccctttggtggaaacacgcatcccgttctccagttcggggttcatctccaccagcccgttggatttatgtccgtaagacatggctttcaggtgtggctcgatgtcctccatgcggatacctttcttctccatatccgccaggtctatcttcgtgacgtccagcggctcgaactgccgctgctcctgcgtctgaagccgttcggaggggtcgatacggtaattttccagaatctccgggtcgaagtcgatgcggataagtttgttcagggcattctccgtcatgacgaagatacccgtgtggacggggttctgggcctgttccatgaactttttgaagaaggcttcgagggctgaatcctgcgtgttcacgttcagcaggctcgccacgttctgatccgtggggtcggcggtctggatattgccgtcctgatccacgccggtaacggcttgtagtcgtccgtcgtcggcattctgaacgagcatgacttgtttagcgtcgttctttacgttttcgtccataattacgagtgtttttagttagcaccaatagcgatgcgggaacgaaagtaaggggaaccggctgaacgtaaaagagttggaaaggctatggaagcatcgggcacagaagtggccgcttgtggcgcagggcagaggaaatcggagaaacggagtgccgggaaggacggatttggcagagggtattttcgtggctcctcaccttatttgtcaggtagtcgggatctattgttaaatgtcaataaagcgcatggataacccgtgtttttttataaatttgcgaaaacgggtttcaatatccgacaaaacgtgaggcatggaaatatataccccaaaaaccaagatcaaactttctccggtgataagaaacgggagagaatttgtcgaagtgactttcggtaatgacaatgacatccgcttgtcgctgtcgaaggaagaaaacgtactgcttgtcggcggcagggcttatctgccggcagaagatttcgtgcttgccgagttcttcgaccgctatgtaaaaatggcgtttatagactattctgccatcaaggaaaccgcaccccgtaaagaggaagacaaacggccgccactgccggaaggctatctggaaaaacttcagcaagtgcgttacagtgaccataccgtaagggtatatacctcctatttccgcgatttccaacagcatttcgaggggcgtaagattgaaacggttactcccggcgagataaacgactacctgctgtatctcatccacgagaaaaacatatcctcctgccagcaaaaccagcgtatcaacgccatcaagttctattacgagaaagttctcggtcaggaacggcggtgttacaaggtgaaccgtgccaaacgggagaagacgctgcccgacgtgttgagcaaggaggaaataaagaaaatactcgacgtgacggtgacagacctgcgtttcttctgtatgttctccatactctattccgcagggttgcgcatcagcgaactgctggaactgaaacccggcgacatcaacgaatcccgctccctgatacgggtgcggcagggtaaagggaaaaaagaccgctacaccctgctgtcaagaccgttgatgaaaaagctgacggaatataacagactatacaaaccgaaagtgtggctttttgaacacagaccgggagaacctttcaccgagagtatcgtgtcgaaacggctgaaggcagcggcccgggaagcgggaatcacgaaacggatttatccgcacctgctgcgccattcgttcgccactcacctgctggagcagggaaccgacatcaagatagtgaaagagcttatgggacataacaatatcaagacgacagaaaggtatgtccacatagccgacactttcaaaagcaatatcaaaagcccgttggacgatctgttgatggaggaagacgaggtctgatacttaaagaaaataacagccaaatcggctgatagtataacattaacaacattatgaatacaatgataatgaagctgcttagtactattatattctgtttgtttctgcctttggacattgtaagtcaagtgcatacagacaccttatgttataagaatgacacgatatatcaagagttaagaattacaagggtcaatgaaaagaggatctattttgtcttgtcatccactaaagaaaacggtaagctgagagatatgcataaaggttatgcttctatgtccgattacgcttatcttgcttctgaaacagattttacagatgatggtgaattgtatccggtcattgaatattggtatgaagatccagatatatcattttccataagagtcaattatgatatgggattagctacaattaaatatgaagagagcttttcattgccttatatttataaactgaaaaagaaataaagttgttaacaagcacctgtgccacctaacggcggcaagctgccagacattaacaacattatgaatacaattgcaatgaagctgcttaatactattatattctgtttgtttctgcctttggacattgtaagtcaagtgcacgatacagacaccttatgttataagaatgacacgatatatcaagagttaagaattacaaggatcaatgaaaagaggatctatttcgtcttgtcatccaccaaagaaaacggtaagctaacagacatgcgtaaaggttatgcttctatatccgattacgcttatcttgcttctgaaacagattttacagatgatggtgaattgtatcctgttattgaatattggtatgaagatccatatatatcattttccataagagtcaattatgatatgggattagctacaattaaatatgaagagagctattcattgccttatatttataagctgaaaaagaaataaagttgttaacaagcacctgtgccacctaacggcggcaagctgcaacccattagcaactttacaaactaaaaagaatatgagtgaccaaataatttttgatgttgacggacttatagaagctcaaatccgtcagagagataaagactacgcaaaagtctgttgtcagaacttattaaactacgcatacggaaaggggcttttgtgtgataatccatgtgataatgaaggaaacctaatcatgccttcaattattaaggaaagttctttaacagaaattggtaaacatatttttgttgaattgctatttaagtggtttgcatacacagataatgaaagtggaaaaattgacagaaaaaataacatcaaaatgttagagaagtattacaatcaacttttacaaaagattgatagaaaataggttgctaacaaacagatgaaacattgaaggcggtttatctgccggacattagtcgcttgaaaaataaaaaaagaaaatgagtaagataatgatatgggtcggtcaattcgattccgaagctgactttgagaaatatatggatcaatcggctttccgtcaatggtggaaagattacgatgaagacaataaggaacttcgttgccagttctgtaaggagcttggtgtaatgagctatgatgaggattttcttattatgaaattcacatctgacggcttggcaggattactcaaccttattcctgctgatacccaaaagataagtctgtcgatggctgataaaaatattacaatggcaaatgctgttatctgctataattgtcgtgagggtatatctcctaaaaaggcagagaataccacaaccatgacttatcttggtacgtttgagtttgaactgtcgcctgaaggaatgcaagggtctaatgctggattagaatatatgatttggattggcacaaccgctaaaagtcgggaagaatttatggagtatttcaatcaagatgagtacatgaaagaaatacgagattacgaagaaggtcgtacaaagaaacgtcccaatccggaacatcgctgtcagttctgtaaagacgttaatataaagtattactatccagaatttctaactgtggaaattaaggatgaacccgaaaatccttttaatcttgttagaatgatgattgataacaaacttgtccttgactggtatattgaatccgatattgatgaataccacataaagccatcaaattgtattgtgtgctatatacccaatggtttcaaggacaacaaaaggaatcagaaaatctttattaagaagaaaaattatgattcatatgaaacacctaaaaaatttgtggatgaattagacagttacaacggtattcaatatttggaaacttatattgcagaataaagcgactaacaaacggataaatttcccttaaaggtcgattatccactggacattatctgccagaataaaataacaataaaaaagaaaaaacaatgattaggtatattgagaaaggcgacatattccgcattgagggtgtaagtagttatgcgcacggatgtaattgcgccggtgcaatgggtaaaggcattgccgtgcagttcaaagacaaatatccagatatgtatcttgaatataagctattgtgcaaagaaaacaagttttgccccggagatgtatttgattatgattatggcaacgggcatatatataatcttggcactcaagcaacgtggcgaacacgagctaaaatagagtatatcgaaaaggcactgatacagatgcttgagttagccagtggtgataatgtaacggcaatagccttacctgcaatcggtgctggattaggaggattaaaatgggatgatgtaaaagctgttttgaacaaagtttcaaacgattatcctaacgttgatttgtatgtagttgaaacttatcaaagtgaatagtggcagataacaagcggctcaatctccccagaaaggtcgattatccgccggacattaatcgctgagaaaaatatgaataattggattgaaacatcaggaagcccatttgtcattgttgagcaacaatatgcccatcaatggaagggtcaagaaaactacaatgctatatgtagcgtaacagattacttggggaaaatctatatagacaatcatgtcttattggtaatgggagatgaaccgatggctacacgcatagtaaataaagatggagcaatcttaataatccgctggaagtatgctcccgattatttaacggtggaaaaacttctggagaatgatatcgtaaacgggattgaaccaatagaagaagttgaagtaaaatgggattctactgaattagtcctatttgattctttgtctccctattgtgaagcgtcggttaaagtttttttatcattacaaaaaacatcttgtataataaaaacttatctttatcaaaaagacgaagtatctttaataatacattcaatccaataaagacgattaacaagcggctcaacctccccttaaaggtcggttagccaccgaacattagttgcagcccaaaatgaaataaaaatgaatgtaatatcggaaaaagaatattcgttctcaaatgcacttttttggaacgtaatgttgcatcatcatattcaagcctttgatgaagaaagggatgtgaattttgatgaagtatgggatgaagaacttgtactaacattgttggataaaaagaagtacaagaaatattggtgttggctatctcaaattgatttgaaaacatccgaaaatcaaggtgaaatagaaaacccaagaactctaacacttcctatcggcagcgatattgtattgacaatagaatttcatccttgctgtacatattattttttgaatgacactttaatcggggaagttagtggcaactttcacttgaagtatctcacatattcggaattaatgaggattacaaaagagaaatatggagatgtactgttccatttactcttacctttgtctgcaatcagggaacaagaaaaaggcatagcacttaatgcaataatccaacgattgcaacaaattcccttattcaaggaacattccgcatatataggtaaatgtatcttgaatggattattaatatccaactctgacatacaagaaattcccaagataggaacgatatgtacaagcaatcattcatatagaaatgctttggtatatgatgatgaaaggcaggaaataaaggagctaaatatccttttatcgagattataaatatgcaactaacaagcggattaatctcctataaaggtcgattatccacagaacattaccgattaacaatgacaatatgaaatggtataaaatatacttgaatggagaaaatcgaatatggaagaaatgtattacatattcgtgggagtttatatatgaagataaagaaattaattttcaaagaattatagattcatcttcatcggaaaggtatcagataaaagctcttatcaaaggtaaggggctaatcgctaaaagtatatctggatttgggcaaataagaatgccagaatttgctgaagtcagccatttgtttcttgtcagagaagatatattgaatataaacgaattgtcctccataaaaggaatttctttaaaaagggtttcagtatatggagatttcccacttgattatatggcaattatttttaatgaagtaattgattgtgttgacaatattcattccaaacgagaagaatttgaatgcatgagtacacttgtgttagatatgtctaaaataccttcatctgtagatgggttctttttaaaagggtggaataaatacggtttttataaaaacattgtcaatgaaaatatgaaaatgcaattacttcatttgtataaggcaaatgagtttttaaaatttaaagaaatagaaataaatggcacatcggtaacaaatggataaatctccgtaagagagattatccgccgaacattagcaactttacaaactaaaaagaatatgagtgaccaaataatttttgatgttgacggacttatagaagctcaaatccgtcagagagataaagactacgcaaaagtctgttgtcagaacttattaaactacgcatacggaaaggggcttttgtgtgataatccatgtgataatgaaggaaacctaatcatgccttcaattattaaggaaagttctttaacagaaattggtaaacatatttttgttgaattgctatttaagtggtttgcatacacagataatgaaagtggaaaaattgacagaaaaaataacatcaaaatgttagagaagtattacaatcaacttttacaaaagattgatagaaaataggttgctaacaaacagatgaaacattgaaggcggtttatctgccggacattactaacaaggaaaaaataatatgtgtcaatacaaatcaatatgcaatcctataatagagcttacaacacttttacagagttgtggcttcacaatagaaaaacaagaacttaaagattggcatttcaatgagtttgagattgtgatgaaaggaaagaaattacaacttccaatgatagatatagaaggtatagaacaacatagcgacaatatatattgttgcaaatgtcattggtctgttgtaaaactaataatgaattgacacaataaaatgttagtaacaagcggcttaacctcccctgaaaggtcggttagccaccaaacattatctgcccagaataattaacaataaaaaagaaaaaaacaatgattaggtatattgaaaaaggcgacatattccgtattgatggagtgagcagttatgcgcatggttgtaattgtgccggtgcaatgggtaaaggcattgccgtacagttcaaaagcaaatatccagatatgtatcttgaatataagcagttgtgcaaagaaaataagttttgccccggtgatgtttttgattatgattatggcaatggacatatatataaccttggtactcaagcaacgtggcgaacacgagctaaaatagagtatatcgaaaaggcactgatacagatgcttgagttagccagtggtgataatgtaacggcaatagccttacctgcaatcggtgctggattaggaggattaaaatgggatgatgtaaaagcaattatagagacagtttcaaatgattatcctaatgttgatttgtatgtagttgaaacttatcaaagcgaataaaggcagataacaagcgtatcaatctccctaaaggacgattattcgccgaacattatcgtttaatatggtaagtagaaaagaaacagtaaaaagttgttgtgtgaatatacttgatgatgtaaaaagaatattagcgcaaccttttgaatgtaggaagacttctcttcctgatggtgcattacataatgtacaaaaagaattggaaaatatgattaatgcgattgataaagatatttactcgtttacaccaagttatggcaaatatctaatagattgttggcttggagatgaattagtagataaacttcttgatgtttcttgtcaatatgaaaaactaattaagttgaaataaacgatagcatacggattaatcttccaaaggtcgattatccaacaaacattatcggtctaaaaattaaaatatggatagtaaacttcaattattcgctaaagtgttattaaaagaacactatgatgaatttttagaaatgattcagttgttcaatatagataagagaacctttgtccttcaacataggaaaatgtttgaaaagggatggtacgatacaagctctgaagacaatgaatttagtgaagtagatattatgctttgttttgctatagtttctcacagaatggcagttattgattggagtggtgaagaatattcagggcaggttaagcgttccattacgatgatgttaaagaattatgggatagaacgtttcttatggaacactaaaaagtttgaggattctttggattgggacaaaattcgccgaggtgactatttgcctttgttgttccaagctatgaacaagcaacttaacagaggcggttattccattgtgttttgtgatacaaaatcggattgttttcgttatgcaatattaccaactgccgagtttgtgcaatttgagaatacggaattagatgattatctgacaatcattagtcctaagatttacaatatatatcttgcagacaagggaaatgaattgcctaaaattatgctgtacttaaaaaagaaattttctgttccactaagtgaaatcaaggaattttgttcaagagataaaattttacttggaatagggaactctataattgtggatgaatatcgaaaagaaattgaacaacttggaggcaagattgaaacagaagaaatagaccgataacaaacagcaaaccgattgaataagcggaacgctgccgaacattagcaaccccaaaaagatgaaaatgattggagaaactataagaactgaatttgaagcattgaaaaatgactttgaaaccataaggcaacaaatagaagacgatgttgtcaggactgagttgtataagggcgagttttatgaacttactccatattcctatcagcgtaatggttgcaaacaaggaaaacctgtaaagcgtcctgatacaataaaaagcaccaaaaatctttgtatctacggatttaataaccaaaatcaaatcgtagaagttaaggttggttgttctattgaaaatcagttttatcacactttcctgtattatacagacaatcttgtgaaaagtattctatacgataatggaaaacatttgatgaatgtatgccattacttttttgagggcggaaagctgaaacggtcacagttatgtggtaggtatggttgccgtgaagagaattatatctataaagaaaatgctttgacacatattgaagtcaaacaatatgatattgagggtaatagtggtaatgatttaattcatatattccaatatcaagacgatggggctttagaaagtattaccaaatcatttccaaatggatattctgaaataatctataaaacgaaaagaggttgctaacaagcggcttaactacccctgaaaggtcggttagccaccaaacattaatattaaaaggaaacactatgatacctgataaattgaaagatgattttaattcattgagaaatatgtttgatgaattgaaaagagaaattgataagaatgttgtaagggaagagaattacaaaggtgagttctacgaaatatccccttattcttatcaaagaaacaggtttaagcaagggaaaatagttggaaatgtaacttctctcaaaacaactaataacctatttacttattatttcgatgtaaaaaatcaaattatagaaatccgagagggcttggaacttaaaaatcaattctattacacctttttcatttatgaaaaggaactcatgaaaactattgcatatgataatagcaaacgtattgtgaatgtccgatattatctatatggaagtaatggtaaaatagagaaaatgtattcaaagggttctcgtggaagtagagaagaaacatatttttatgaaaatgaccgcctacaaaaaatagttataagacaatttgatagaaatgatattgaacaggatacgttacaacattcatttgattataagtctaatggagaattaaaatctattattctttcgacagaattatattctgaaacaatctatcaggaaacataaatttaatattaacaagccgggataacggactaacgccgttccccgtcaaaccattatcaattacagtacgacaatatgaacttttacttaataggtagtttagaaggatttaacgatttacgttttccaaatgtggaagattggcaaaattgtatgggacatgctgaaggtttactaaagcagtggaatcctcctgagatggaatatatatggaaaaaaagtaatagacataaacattttgatttatcacaattttgtaatcctctattaactattagcgacaaagcattaagtattttagaaaatattcttatcaaaaatggagaaattcttgatataaagtcgccaaaaggtttttatttttttcattgtaccaatataatagatgctttgattgaaaaagaatcagatatagtgtggttagataaagaaagaggatgggtgagttgtataaataaatttgtgttggataaaaataaaatccaagagcaaactattttcagacttccgaatgtaaattgtcgctatactttttatggggaggaatttaagaaccttgtattgaaacatcatcttcaaggaatacattttgatagatacgaaactattattataaaatgaatgattgttttaaagtttgtagttaaagtattgataacacgcacatcaatcacttaaacagtgattatctgcatcctattaaacattagaaaatgagaacaccaatcataatcctgttatttgtaatcctgcttgccgcaagctgcggagagcctcccatgccgccgtcggacgaggaaatgatacgccatttcaccacgcacgaggtggcgttccgtaaggtgtacgaaatcatggcagagagttcagaaggtagttttcactacccgccgctttctccggaagaggtcattatacttgattcaacagaacaaagcgatacattccatgaaacgaatgacgaacaagacattccggtatatggactgttgaagccggagcgaatcctactcgactccttgttatcagagattggatgcggttttatccttgttgatcgcagggaatggggaacggcagattcggtatatgtgagccttgttatgccgtactactcccacggcatcgtggatgcgggaacgtccaagagtttcgtttacgatcccggattgagaagccgtcggaatatccgtatcaccgaatatggcgacctgaacgagatctaccgcaggacgtacaacgacaccacgctttacaaacccatcaagggaaactggtacatcgagttagaccattcgatataacggcccggagttcgtatcaaagcttgtttcactttttgtcaagaagatacatcataaagcagataatggctatcgcaaggaaaaataacagaaccgcaaggagttcgttaaacctgcacttggcatagtgagacatcactgctttgcctcgccatttgtaaatcctgctgacgagcgacataacggcaaatgtgacaatgctaaaaacgacacatggcaacaatgccgacacacctggaaaaagccggatagtaacagtcatcatagggaatatcaaaagagcgaagatataaatcgagagcatcatttcgccatcgaccctgcctgttcgtcttgcttgttccaatttctcccccatccaccagaggtagtcccagagatagaaccgttgcttattctcctgccgtttcatcatgcccaatgtataaatccgaggtggaacatcagcgctacatttgccacgatcagggcgatagcgataagaactattttggcgagcttcctgccgggatgtttcatcttcccgtaatgttcacggagcgcttcacgccgtccggctgtatagcgtagcttgcagaataaatcgggaagaaagcagagaggaatcactatggccaaaccaatcatccagccgaaaaggcgcaatatcggcggaaccccaagcggtatgagtaggacgaagagccagcaccaaaacagtagcatacgtccgttgagattggtacgctccctttcgtgccatatctcggctacataccacatatagtcgatgaagcagatccggtatttgcgattgtccttttccataccgttatctccatacaaagaaaccaaccaatataagtataatcagaacgctgaccaacacaatctgaaccctgcggcgtgtttcaggcttgcaatcgtcaaataaccacagtttgctgttaaactgccaatgacacgcccatttccaacggaacagcaaccctgcaagccatagggcaagcaacccgacaccaaacagcaacccgtatttcgggtgagcctgcaaccactcgaaaaacgcttccgccttgctgttcattgcttcgtatatatcggtaactgtcatacttataattaaaaggattccgaacacaaaaataatgttttctgttcacataatcactactttatgctccaaaacaccggctgtgcggttataaaaccaagaaacagcccccgttaaggtaacggagggtgtttgcgggggtgtttgtgttcatttagttctgttccggcaggagcttgcaaagcaccgggtcgttcttgatacgttccagttcctcggcgacgatgcggccggcctctgccttgatacgttcgtagttttcctgcacgacctgtttcatgtgatccgtcccgttctcgtccgtgaaatcggtaatttgtggtatcttcttgtaccgggccgtttccgctttcactttttcgttgtccacgacaatctcgcagtggaaaatcttctgctcgatacgttcgtcgaaattgtccgccacagccccgacgaacattccctgcgtgagcgtcgagatcttcgaggccgggatcaggctgtccagctgcgtggatatggatgtcgatttgtcgctgcggctcaacgtcatgctctgccgcttctgcaataccttaccgaaccgttccgagagtgtcttggccgtttcacctacgacctgcccggagaagatgttgcccaccgtgttcatcacgacggcggcctccttgtccccgtagtccctcttcaactgtgaaaaatcctggaagcacagcagcacggcgaccttgttgcttctggccgtggcgatcaggttgtcgagtcccttgaagtagattgtcggcagctcgtcgatgatgatgcccgatttgagctggcctttcttatttatgagcttgacaatccgggaattatacaatcccaaagccgctccgtaaatgttttgcctgtcgggattgttccccacgcagagtatcttgggatcgttcgggttattgatgtcgagcgtgaagtcatcgcccgacatgacccaatatagctggggcgaaatcatgcgggaaagcggaattttggccgatgctatctggccctggagctggtcttgagcgcctccgagccaggcatccataaaggggctgaggtagttttcgagttccgggtaggatgtcagaatcgggaaaatatcctcgtaccgcttgttcaggaactcgatggcgtgcgggaaggtacaataccgcccgttgtcgtagatgcgcaggaaccagatcacggccgcgaaaaggataatggggctttccacaaaaaaatcgccctgcttctgcacccagcttcggttcaggttgagcatgatggtataggcgctctcgtaggcgtccgaaatatcggtcatgaagtccgggtgaatggggttacagcggtgcgagcggcgcgggtcgtcgaaatttatgacgtagaaagtcgggattttcttgtaacctttctggtgattcagcaggtggttgtaagcgatttccgaaagatcgggaaacttgtagtcatagatgtattgggtatagcccttttcgatttgctgtttaataaactggtttacaacacaataactcttcccgctgcccgggcttcccatgcagatgcaagccctttgcgggtttacaacgttggcgaacccgttgttccactgtttgttatagtaaaatttcgtcggcagatttatggagtactcgttctcgatcaggcgtgtttcctgctggaatgattcgttctcgttattgaaagggtcatccatgagattgttcttcagcaggcgggacatccacacgccgcccatcaagaggcagatatacccggccgatagggtcagtatgtagaaagccgcgttcgccgctgccgtcagcggcaagtccagcagccaccagttgaagaagaacagcacgcctcccgtggccagcgatgccgtgattttccgccaggtaattttctcctcttttactccttttgtcccgaggcatgaaagggcgaggaacactacggcgaaaagtttcgtccatagtatattccggaacagccccgcggtgcggtcgaagttcagcagaatcctatcgaccacgccgatattgattccccattcccgtatctgcccgtagcagaaccagtagatgttgataaccacgaacaagatactcaatgcccgcatgaaatccattgttttagcaagaccccgaaggtcgtcttcctgttgcataaccgtaagatttaataaatgaatgataattgagatgttatactttcctccgtcgtgaggtattccgcttccgttgcccgtcccgtccggcaggcgcttgtttcggggacaagcccctcgtgttttccccgggattccgttttccgccgaagcgcagctcgaaggcgttggccgagtatgcctttcccagccgtgatccgttcacgaccgtccgtgtttcgtggtcaatgaacgtcacacccacgatgcggccgttttcgttgcgtcgtatgtagagatccacccgggctccccgcaggcgttcgcgcagttcttcctccgtgggttctccccgaagcgctttatcgacccggccacggatttgcctcctcgtgtcgtccttcccgaaccgttcggcgctacgctccatgtgccgttccagcccgtcatacccgacctctttaccgaacagtgaggatttgagcggcgcggccactgccttgtccccgttctcgtccagcagcgtgtagagcaatccccggtagggggttccgttccgctctccccggacttcctctatacctatattatataaggacagcaatgcccggaactcgccgagggtctggaagcggtatgtcgccacggccggttttattaccgctgccacctggcgtttcaggtcgccccgcgtgtaatcggcggggacgatcccttgccctttctcccgccttctccctttggcgggatgcagtccgtactcccgttccagttcctcggtaacggccacgctgcgttcgttgcgcctgctgtcgtttatcttgcgcccgtcctgggccacctgcaccgacacgatatggatatgctcccgtccgatgtcggtatgcttgaatacgatataaggttgtcctccccagcccatgcgctccatgtaggccccggctatctccgcgagctgcccgtcgtcaaggcggtcttcgggagccgggttgagcgatacgtgcacgacgggtttttccgtccggtagtgcgagggcatccagcgcaggaggtcttctgccgtcgcggccacgttgaagcgcccatccgccggctccctcactatgtgggtcagcagtactttcccgtcgccccgatcgactttctcctggttgtacgccagcgcgccgtacacgtcttttccggtggtgatattggctaccatcgctgtttgaactcttcggagagcgacacgacctgctgcccgacggccgccagttcacgtgtcgctctctccagtttatagagcagcgcgagtgttttcttctcggaaaaatgcgcgtgcagctccttcaccacctggttgtaattcgttcccacggcacggaattgggcgtggaaagcggtcagcttcgccacgtattcgagcgttccccggtcggtctttaccacccggaacgcctcgttgaacactctcgctttgataaaagcggctttggacaatagcccggactgctcgtaaaggtcgaggaaacgggcatgttccacggctgaaaagtttaccgaaaagcggtaaacggccgggtcgtttttcgcgggtcgtccccctttgccccctcggggctttctgttcttttccatcgcatcgaaattttaaggagaggccagagccccaccggttcctgaaaattccgatcccttcgcggcctgccgcccttctgaaaagcaccgactccggaggtgctttctcccccttgcgggcaagctgttttctgctgcaaaacgagaatcgtgcagcagaaaacacagcttgctatttgccctttgcaaataccttctgcccgctcgcggacagaacattgaaagagccgccgtaaaacggggcaaggacggcttcattagcgtcgggatcgttcacgaggcaaagataccgacctattcaatcacttgtgccataagcgattacgccacttgcgtccactttgacgccacacgcggccatagcggaaaaagagcatacaacccgtgtttttaagggtttactttgcacgtgagaacggatacgggcaatgacacatccccctgtccgcacacgtgtggacggatgcagaaaacatcgtgtgcagaggaaaaagcgggtctttgtccggataagcaaatgcggttgcgcatgagtataaaatcggacacgcgcccatgcaccggcataccggcgtaacagcctgccagcgcaccagcatatatgcgtgccggcataccagcataaaatctcatgccgtcacttgtccggatacgtgaagagatgaacgattacccgattgtataactaaaaacgcatggaacaatgaaagagaaaacgaaattcgtggccttctccacccagaaaggcggagcgggcaaaaccaccctcacggtgctggcagcctcttacctgcactatgtaaagggtttcaatgtcgcggtcatcgactgcgattatccccaacactccatcgtggagatgcgggaacgtgacctgaagcttgccctcgaagacgaacattacaagaggttagcttacgaacaattcacccggcttcaaaagaaagcctatcctgtcgtggaaagcaacacgaaagaggcgttggccgatgccgactacctcctgccgcaaggtgatttcgattatgtgttcttcgaccttcccggtacgatcaataacgaggatctgattcattccctggccggaatggattatctcgtcgccccgatcagtgccgaccgggttgtcatggaaagcaccctgaattacgcggttgtggtaaaggagcatatcatgggccgcgagaagtcccggatgaaagggctgtatatgctatggaacatggtggacggacgtgaaaagacagagttatatcaggtttacgaggcggtaatgaaagagctgggtcttcctgttctgaagaccttcctgcctgacaccaagcgttttcgtcgtgagcagaacgccagccgtcgctctgtcttccgctccacgctcttcccggcagaccgttctttgatccggggcagcaacctggataaactcgtggatgaattgatcgaactgttaaagtaggatcttatgagcggaaaagaacatgacgacggtttggacgcttccttcatcatcagccaggccaaaagccgaaaccggccattacatccttacacgccggaaaaagaggaggaggcatcggctctatcggaaccgtccggcgaggccgccgcctcgccggctacgaaagaggagggacgccgccgaagagggaaaggccaggattacgagcgtctttttatccggaacgccccctccaatacccgaagcggcaaaacggtgtatatccgcaaggagtttcacgagcgtataacccggatagtgcaggttatcggtaagaacgaactctcgctgtatagctacctggacaatgtgctggagcagcatttcgcgacctatcaggaggaaatttcggaactctacaagaaacggaactccgatattttttagttatgaacccaatatttacaacctattaaaaacaatccatcatgtcagacaaagcaattattttatctgttatcctggcggccgtcctttgcgtcgccgtgcccttcatcttccgcgtgtgccgctaccggcgcaggatgaaaacccttatcgtccccgacggcccttcgggggaggtcgccgtggggactgtccccacccccgaggccgagtacctggcccgttacatctgcctgctgcggctgcctttcgccggtaacaagcacgtgaagatacgtccgtcgtatcacgagcgtatccgcgagatcacccgtgtcatcggtcgtggcgacgtgacgatcacggcctacgtggacaaggttctcaaggcgcacctggacgataaccgggaaaccatcgagcggcttttcgaggagcgtgaggccgtggcctcccggcaacccaaagcggaggagcgatgaacggggcgttgtggctgctgcccctctttgccgtggggtatgccttgtgggcgtttttccgcctgtggcggatggaacgcaacgaaccggcagacgggatcgttgccgaagacactccctgccggcaggagatcatcggcaggagccgctttgtcctcgacccgcgccactcccggccacaagctgccgtagaatctgaaactgaaaaagttacggaaaaagccgatatatttgtgcccacgaatgtacccgaacacccccggcagattccgccggaagacctggatgaagtgttcggtgtcgctcccgagggggagcctaacgaacctctggaaatcgactttccgctgtacgatgaatctttcccggatgcggacgcggaggagccggattatgacgaggatgaagacgacaccgaagagctgccccttttgggccgctcgcttgcccagggggttagttttgaacagatgggcgaagcctaccgccacgtggtacatgatccaccttcaacagacgagcaaagggaggaaacgggacgtgtcctcctgggcctgaaacagaccgacatgttcgaggtcatcgtttcgggccgccccgacgggaacgacagggtaaaatccctgatcgacacctacctctcggcctttcaccggcgtatgtccgagaggtctgcggaaagcccatctccgcagggttcggttcccacgggtttcgacgtccgtgagtttgtttaaccccataatgacatcacgatgaaagaaaaagactacgggtagcacgtgaggctatcctcgaaccactgaaaaaatccgaatcaagaagtttaacccggtgcggggcctatccatccccgcgccacaattcaaacattatcgagttatgagaaagaacaagattcttcttccggcggcatttctctttgccgccatctcctccgctttcgcgcagggcaacggcatcgccggcattacggaggctaccaacatggtaaccagctacttcgatcccggaacgaagctcatctacgcgattggggctgtggtcggccttatcggcgggatcaaggtctataacaagttttcgagcggcgaccccgacacgtcgaagaccgccgcgagctggttcggcgcgtgtattttcctgattgtcgccgcgacgatcctacgctctttcttcttgtagtccaacctgtcatgcaaataattatggaatatggaatcaacaagggaatcggcaagagcgtggagttccggggcctgaaggcgcagtacctcttcatcttcgcgggcggcctgctggccgtcttcgtggtgttcgtcatcctctacatggcaggggtcgatcagtgggtatgtatcgctttcggcgttgcggcggcttcggtgctggtctggcttaccttccgcctgaacgcccgttacggggaacacgggctgatgaagctgttcgccgcgcgccggcatccccgctacctgctcaaccgcaagtccctgcgccggttgctgaaaagaaaggggggccgcgtatgagaaacatcttgaaagccaccacgctggaaagcaagttcccgctcctggccgtggaaggcggttgtatcatcagcaaggacgcggacataacggtcgcctatcgggtcgaactcccggagctgttcaccgtcacgtccgccgagtacgaggcgatccacgccgcctggtgcaaggccctgaaggtcttgcccgaatacagcgtggtacacaagcaggactgggtgcgacatgatgtcgtgtaagtgattgtttaacaaataatttaagtcatcgagtatgacataaaacaaagattaaacctgctgtttcgtcagcagtagcctatgggcagatgcaccttaattgtattaagctgcccagacaaggtagcccgcccgaaaggggcagtttgaaccgtgaggggaaaacaatcgtcgtcagtatcagacggcgcgggagcttggcttgaatggtatgaataacacatgtgaactgtcgctaaacgtcgttagtttgaatgagccaaacgatactgacaggctcaagcccggaaacgggtgcagcgaggataaccctctccagtctggggttacacgaaccacactgctgccggcggaatgacagattctaacccattctctttgtcacttacacggaacatggaaaacctgtatctctcctacgaaaacaggtaagccgaccgtaaggaaggccgaacgggatgcaggcacaggaatgcggaaaaagcgaatgccgtcctgtaatggggcggataggggtttcaacgttaccctacgcgaaagcgggcagacttccgcatggtgactctttacaagaaacttttagaactttttaaagttgaaacgcaaatgaacgaattagaaatttcgtgtgcatcgactgaccgaaaatcgaacgcttgggacagcatagactggctccggtgcgaaattgcggttaaaaagctacaagcacgtattgtaaaggctcaaaaagaaggcagatacggtaaagtgaaagctttacagtggatgctaacgcattcgttttacgccaaagcattggccgtaaagcgggtgacctctaacaaaggtaaaaagacagcaggggttgaccgtgtattatggaaaaccccaaaagcgaagtttcaggcaatcagcgaactgaaacgcaggggatacaatccccaaccgttgaaacgggtctatatcagcaaaaagaacggcaaacaacggccgttgggtattcctaccatgaaagacagggctatgcaggcgctgtatctgatggcattggagccggtagctgaaacgacagccgacaacaactcctacgggttccgcaaggaacgaagcacgttcgatgcaagggaacaatgcttctgtgtactcgcaaaagacgtatcgcccgaatggatacttgaaggggacatcaaaggctgtttcgaccacataagccacgaatggctgctgaataatatcccgatggataaagtgatgctccgcaaatggctgaacagtggttttgtttacaactccgagctattcccgacggttgaaggcacgccgcaaggcggtatcatatcgccgacccttgccaatatgacccttgacggattggaggcggtactgaaaagacggtttaagacacactgtaaaaagggcgtctataccagctacaaggtacaccttatacggtacgccgatgattttgtaatcaccggagcatcgaaggaattgttgcaaaacgagatcttgcctattgttcgtgagtttctccatgcaagggggcttaccctgtcagaagaaaaaacgaagataactcacatcggcaaaggattcgattttctcggatacaacattcgcaagtataacggaaaacttctgataaaaccgtcaaaagagagtctgaaaaggtttatggtcaaaatccgggaaaccatcgaagctcataagggagcaaaacaggaatccctgataagactactgaacccgatcataacgggttgggcgaattactatcgctactccgtatcatccaagactttcaggaaagctgacaaactgatcttcgaaaagttatggcagtgggcacaacgccgacacccgaaaaaggggaagtattgggttgctgacaagtatttccacaagattaacaaccgtaaatggactttcgcggtcactcccaacaagagaaaacccgaaagtataatcgtgctgaaacgactgtacgacaccaaaataaagcggtttgtaaaaatcaaaggggatgcaaacccatacgacccgcagtggaaggaatattttgaacacagggaaacctacaaaatgctccaatcgctcaacgggtataaatcactgctgcatctctggaagagacaacaacgctgctgtccctactgtggtgagccgatagacaacgaacactcttggagtgtcgtaaaacagctgacaaataaccgaatggatagttttcttcttcatgacggttgccgcagaagttattaccagttaaaaacagaggattatgagccggcttttatgtagaaataaaagcattgagttgcttgagccgtatgaggggaaactctcacgtacggttcttaggggggaaaggggcagtaatgtccctgacctacccgacttcatccgcgagcgttaccgcccggccacgggcgagggggacatgagtttcctctcccgcagttacgagcggcatttcaacgagcgtccgttcctgacccacgcctgcttcctctacctgacgaaaacgacgagggagcgtatgcacatgcgttcagacttctcgaccctctgccggggcaacatcattcccaaagaggtaaaccgggaatcggcgacaaaattcctggaggcggcggaacagttcgagcgtattctgaacgattcgggtttcctgacccttgtccgcctcacgggggacgagatcacgggtacggcggattgtccgggcctgctggagcggtacttttccctctcgctctcggagacgacttctcttcaggacatcgagctgggggccgaggttctgcgcgtgggcaacaaacgggtgtgcctgcacacgctctcggacacggaagacctgccggggcgcgtgggtacggatacccgttacgagcgtctttccaccgaccgttcggactgcctgctctcgttcgcggcccccgtggggcttctgctttcctgcgaccacctttacaaccagtacgtgttcctggaagacagcgacgaaaacctgcgtatgttcgagaaacgtgcgcgtaacatgcagtccctttcccgctactcccgcggaaaccagataaacaaggagtggatcgaccagtatctcaatgaggcgcactcgttcggtcttcaatccgtccgggcccatttcaacgtgctggcctggtcggacgacgtgcaggagctccggcatatccgcaatgatgtgggcagccagctcgctctgatggagtgccgcccgcgccacaacaccgtggacgccgccacgctctactgggcgggtatgccgggcaacgcgggggatttccccgccgaggaatcgttctacacgttcatcgagcccgcagtctgtttcttcacggaggaaaccaactataaatcctcgtccagccctttcggcatcaagctgtgcgaccgcgtaagcggcaggcccctgcacctggacatctcggacgaaccgatgaaaaaagggatcattacaaacaggaataaattcgtgttaggcggctcggggtcaggcaagtcattctttatgaatcatttagtccgccaatactgggagcagggcacgcatgtcgtgctggtggataccggtaacagctaccagggtctttgcgagctgatccggcgtaagaccaaaggtgaggacggcgtgtattttacctataccgaggaacatcccatcagtttcaacccgttctacaccgacgactactatttcgacgtggagaagaaggacagcatcaagacgctgctgctgacactctggaaaaccgaggacgacaagatcacgaagaccgagagcggcgagctgggcagtgccgtgaacgcctatatcgagcgtatccgcgccgaccggaatatcgtgccgtgtttcgacagtttctacgagtacctgcgagacgactaccgccgcgagctggaggagcgggagatccgggtcagccgcgaggatttcaacatcgacaacatgctcatcaccctgcggcagtattacaagggcggacgctacgacttccttctgaattcccgggccaacatcgacctgctctcgaagcgcttcgtggtcttcgaggtggattccatcaaggaaaacaaggagctttttcccgtggtcaccattatcatcatggaggctttcataaacaagatgagacggctcaagggggtacgcaaacagctcatcgtcgaggaggcctggaaggcgctctctacggctaatatggctgaatatctgcgttatatgtataaaactgtccgcaaatactacggtgaggccatcgttgtgacgcaggaggtcgaggacatcatttccagcccggtggtcaaggaggcgatcatcaacaactcggactgcaagatcctgctcgaccagcgcaagttcatgaaccgtttcgacgcgattcagtccttgttggggctgaccgacaaggagaaggcgcagattctctcgatcaaccagtccaacgacccttcccgtaaatacaaggaggtctggatcggtctgggcggcgttcagtcggcggtctatgccacggaggtcagcgtcccggagtacctggcctacacgaccgaggaaacggagaaagtggaggtacagcggcttgccggcgagctgggcggtgatatggaactggcgatcaggcagctcgccgagggcaaacgttaaagggagggcaggccatgtatcgcaagtgtatcggatcagaccccacggcggcgcgtttggacttcgcgctgtacgaggtggcgggcgagtgggaaagccgctcgggttctccccgggttcgcatctaccgcaacccgggacgccggggcggcggtttttacgtggaggtgtcctacaaggacgggacacgcttctcccgtcccgtgaggaagtattggggaggtatccgttacttcgacctctacgggtatgtcgccctggcctacgatgcggggcgcgaggtgctccagctctccgcctacggggattattaccgggcgtcggaatgaccgcccaagtattcacgaattaaataatgaaaaggatgaaacgattgattttaacgctgttcgtggggcttctttgcttcacgtaccaggcaaaagcgcagtggacggtcatcgacccgtcgaacctcgttcagaacatcaagagcgcggttcaaagctcgaccacggcgaccaacatggtcaagtcgctgcaagagagtatcaagatttataaccagagcaaggcttactacgacgccctcaaatcggtgcataacatcatcaaggatgcccggaaggtgaagctgacgctcgaaatggtcagcgagatcacggaaatctacacctcgggattcaaccgtatggtttcagacccgaacttcacggtggacgagctggcggcgatctcggcgggttacgcccggttgctggaggagggcggtgcgctggtggcggaactcaagacggtcataaccggcggcaacggcctctcgctctcggacaaggagcggatggacgtggtggatcaggtttacacgaagatgctggagtaccgcaacctcacgcgctattacacgcgcaagaccatctccgtgtccttcatccgcagccgcgaaaagggcgacgcgcaccgggtgctggcactttacgggaacccgaacgacagatattggtaacctgaaaacggaggcagtcatggatttcgacaatttacaccaggttctccggaacctgtaccaggagatgatgccgctatgcggcgacatgatcggggtggcgaaaggtatcgccggcctgggtgcgctcttttacgtggcttaccgggtatggaaggcactggccagcgcggagcctatcgacgtgttcccgctcctgcggcctttcgccatcggcttgtgcgtgatgttctttcccaccgtggttctggggacgatcaacgccgtgatgtcgcccgtggtgcagggcacgcacgccatactggaggggcagacattggatttgcaggcataccagcaacagaaggacgatttggaagccgaggcccgcaggcgcgagggcaaggcttggttagtggacgacgaggtgtatgaacaacggcttgcggatatgggtatcacggatttgggcgagattatcagcatgtgggccgaacgcacgtggtacgacatcaaggccggtttccggcagcttgtccgggacttcttcgagttgttgttcaacgccgcggggcttaccatcgacacgctgcggacattctttttagtcgtgctgtcgattctggggcccttgtcgttcgccctctccatttacgacggcttccactcgacgctcgcgagctggatttcccgctatatcagcgtgtacctttggcttcccatcgccgacctgttctccgcggtgctggccaagatccagacgttgatgctccaggcggacgtcctggccctgcaagaccccaactacattcccgacagcggcagcggtgtctatattatctttttgattataggtatcataggctatttcacgatccccaccgttgccgagtgggtgatccagtcgggcggagccggtggggctatgggcggtatcaacaaggccggggcattcgccacgggtgtcgcgggcggtatcgccggcaacatgatcggccgcacgttcgggcgtcgcggcggtggcggttcctcctccggtaacggcggcggtggcccggcttcgggcagtgcccccaacgggcgcaacctggcaacacaaggtaacaataatcattcataacaatttggacaatggaattcaagtcattaaaaaacatcgaaacaagtttcaggcagattcggtttttcggtatcgtgttcctctgcctgtgcgcgctggtatccgtgttcagcgtggtcgcgagcttccgtttcgccgaaaagcagcgcgagaagatctacgtcctggacgggggcaagtcgctgatgctggcgctctcgcaggatttgagccagaaccgccccgtggaggcgcgcgaacatatccggcgttttcacgagttgttcttcaccctctcgcccgaccgtgcggccatcgagagcaacatcaaccgtgcgctgttcctggtcgataagagcgccttcgcctattaccaggacatgcaggagaaaggttactacaaccgtgtggtgtcggggaacatcagccagcgtatcgaggtggactccgtggtgtgcgacttcaacgcctatccctaccgggccatgacctatgcccggcaaatgattgtccgcgagagcaacatcaccgagcgttcgctggtcacgcgctgcgagctgatcaactcggggcgttcggacaataacccgcagggtttcatcatggagaaattcgagattctggagaaccgcgatttacgtacattaaaaagataaggctatggcaaagaagagaataaaggctttcggggagtgggtcgaagaccacctgcgccgcgcttgcggggcgctctcgcccgataagcggattatcgtgatcctcacgctgctcttgttcttttccgtcttgtcgctctactttaccgtgtcttccatctaccgcttcggcaaggaagccggggaacggatgcagatacggcatatcgagcggctggagctggaattaagacaacggcaggaggccgacagtgtaaaacatctaaaagatttcaattatgacgacgaacgaaaaacagaataaacagccggaggcggggaaaaaggaactcacgccccggcagatacagatgcggaagaagatggtggtcttcccgctctttttcctggcctttgccgggtgcatgtggctgatcttctcccccggcgaaaaagaacgggaggagccttcggcgggtttcaacacggagctgccgaccccggaatcggagggtatcctctcggacaagcgtgatgcctacgtgcaggaggagatgcggcgcagggagcgggaaaagatgcgctccttgcaggatttcgcgttcgggatggaggacgaggaggaagagcccgtcatgcccgctgccgtgccggataagtcttccggctctgccggcggttcgtcgggagctttccggacttcccgtgccgcctatgccgacatcaaccgccagttaggcagtttctacgaggacaccgccggtgaaacgggggaagagcgcgagatgcaggcccgcatcgaggaactggaacgccgcctggaagaacagcaggcgcagaaaacggcccaggaggagcaggtggcgctgctggagaagtcctacgagatcgccgcccgctacatgaacggcggtcaggcccctgaagccccgcgtcagaaaacctccgtttccggcaaggcttccgtgcagcccgtgcgccaggtgcgccgtaacatcgtgtcgctgctcgccgccccgctgcccgattcggtcttcgcccgtgagttcgtcaagccccggaactggggtttcaacacggtggggagcgaccttcgcgagcccgagcgcaacagtatccgtgccgccgtgcagcaaaccgtgacgctcaccgatggcggggaggttactttccggctgctggaaccgatggtggcgggagatctgctcatcccctcgggtacgcccgtaacgggggcggcgaggatcaacggcgaacggctgacggtcaaggtcagcgctgtccagcacggcggggcggtcgttccggtcgatctgtcggtctatgacacgaacggcaacgagggtattcccgtgccggggtcggaagaactcaatgccgtgaaggagatcgccgccaatatgggcgcgggcatgggcagcagtatcacgatcacggacgatgccggttcgcaactgctttccgacctggggcgcagcgccatccagggcgtatcgcaatacgtgagcaagaagatgcgctcggtcaaggtcacgctcaaggccggttacagcgtcctgctgctcccgccccttcaataagggtacaaacgacgtacttccgtacaccactgaaaaaatccatttttatcaacaatcaaaaatttatcgagtatgaaaaagattcttctggcactcgcttttatcgggtgcatgttcgctgcccacgcgcaggaaaagccctccacgggcgatttgtacgacggtcttacccgtccgctgactttcaaccgggttatcccgccctacgcgctggaggtgacgttcagcaagaccgtgcatgtgattttcccctcggccatccgttacgtcgatctggggtcttcggatcttctggcggcgaaagccgacggcacggaaaacgtgctgcgtgtaaaggcggccctgcgtgatttctcgcgcgagagcaacctttcggtcattaccgaggacggggcctattacagcttcaatgtcaagtatgccgacgagccggtgaaactgtcggtcgagatggcggacttcctgcatgacggggaggcggtaaaccgccccaataacgcgctggacatctatttgcaggagttgggatgcgaatctccgctgctggtcaaactgatcatgcagtccatttacaagaatgaccgccgcgagatcaagcatatcggttgcaagcgtttcggggtacaatacctcctcaaaggtatctacgtgcataacgacctgctttatttccacctccaactgaaaaactcctccaacgtgcctttcaacgtggactacctgacgttcaagattacggacaagaaggtggccaaacgcacggccatccaggagcaggtcgtatggcccgtgcgtgcgtacaacaacgtgcaggtcatcggcggcaagcgtaccgagcgcatggtcttcacgctcccgaagttcacgctggccgacgacaagcagctggtcgtggaactgcacgagcagcagggcgggcgacaccagactttcacggtggagaatgccgacctggtgcgcgcacgtgttatcaacgagttaaaggtaaagtgatatgaaacgggcgatattcattctcacgctggggttatgcctcctcctttcggacggggcgcacgcccagcgtgccctgcccgccatgcgcgggctggaaatacggggaggcatggccgacggcttctatacccgggacagccgcagcgaaacgggctactggttcgggctggccatgagccgctacgcgaagaatgccgacaagtgggtgttcggcgcggagttcctgaaccgttattacccctacaagtcggaacgtatccctgtggcgcagttcacggccgagggcgattactattacaagttcctcgccgacccgtccaggacttttttcttctacctcggcggctcggcgctggccggttacgagagcgtgaaccggggcgagaggcggctctatgacggctctacgctccgccaccgcgaccgtttcctctatggcggggccgtcacgctggaggtcgatgcgtacctgaccgacaggattatcctctcgctgacggggcgtgagcgtatcctatggggcactacaacgggacatttccacgcgcagttcggcctgggcgtgaaattcataatccattaaacttgcaagcgacatgaaaaagatgaaaaagatattggccctggcggtctggatcgccgccctgggtcttttatgcgcatcctgcgacaacgggctggatatacagcaggcgtacacgttctctctggaaacgatgcccgttcagaagcgaatctccgttggtgaaaccgctgaaatccgctgcacgctcgtgcgggaggggagatatgacggcgcgcgttacacgatccgctatttccagcccgacgggcgcggtgagttgaggatggacgacggtacggtgttcctgcccaacgaccgctatccgctcgaccgtgaggtgttccgcctctattacacatcgcgcagcgatgaccagcagaccatcgacgtctatgtcgaggacaacacgggtcaggtcgtgaagacctccttcacgttccagagcgagaacgggacggaggaaacggaacgataacggaatatgtctaaccaagagaagcgcccgtcacccgggcgctttccataaatactgaaaaccatgacagagcaagagagaatagatatagcctatctcgatacgggggtgtacgagaacccgtggcgtgagaaccttttcgagacgctgcccgaggatcggaaaacggcggaggtctgccgtttcgccatcaagaaatcggctttcaacatcgagttcgttcccgaagcgatgaaaacgccggaactttgtcttgccgcggccggccaccggggcgaaacactgaaattcgtccctgaccgtctgaagacaccgaaaatgtgccgtgccgccgtcgatagcaacagctacgcgctgtattacgttccggaggggttgaagacccccgaactgtgcatggcggccgtgaagcgcaacggcctggtgctggaggccgttcccggggaattgaggacgccgcaaatatgccgtgcggcgttgaaagcggtggacagtgccgattacaagatactcccttacattccgtatcccgatatatgcctggaagggctgaaaaaattcgggatgtcgttcgtggacaagttcgagattttcgcctccattgccccggaggtcatgaccggggagctggcccttcacggcgtggggatggacgcgtcctgcctttcgctcgtgccggtggaactgcgcacggaggcagtctgcctgcgtgccgtcagcggggacggcatcctgctccatgaagtgccggaggaattacgcacggaacgggtctgcgaggccgccgtgtcctcgaactacctggcactggagtacgttccgaaacatctgaaaaccgaccgtctgtgcgggatggcgctggagcgcgatcccctggccatccgctttttcaaccccgaacagctcacgccggaggtctgcaaccgggcgttggcccgtaccgacgacctgcgtgtcctccgctatatccccttcgaggagatacacctgaaagtgttggggttctattgcacgaattacgataagaccttcgattttttggagaacatgaacccctggttcctcacgccgagggtggcccgggaaattttcgccctggagccggagctgttctacaaccttcccgatcacgccaagaacgaggagatgtgccgccgggccgtcgggcacgacgggagctacctgcaatatgtccccgagaagtggaaaacgccggagttgtgcatggaggccatacggcgcagtccctatgccatcgcccacctgcccgagagcatgaaaagcccggatctatacatgagcctggtgcgggagaacccgcaaaacctgaaaggcgtcccccgcgaagcccggacgccggagatgagccgggaggctttcgagcgtacctacgggaaggacaaaaccgatttctcggttatcagcgcgttgagcgaccccgccctggtcttgcaggtgttccgcgagcaggacgacccgcagcagatacaccggttgatgagtgtcctgcacctgaaccgccggcttgtaacggaggaggtggcgttggaggccgttcgcaaggatgcgggggtgctgtacgacattccccagacggccatcacgccgctcgtggccgatacggccgtgcggggcgacccgaggatgatccagtgggttccgagggagcttcgcacgtcggatctgtgcctctatgccgaggccgcccatcccgagttgcgggtttacgttcccgacgagatagcaaagggacgtaatatctattcgttccaccgtcaggtggacgcgaaattgcgtcagccgctcgaatacgaacaatacaagaccctctactcgggcggcgcggtgcgtgtgaacaacgtgtggacgtcggttgcgggtgagattgactgctgcgaggtgcgttacgaccgtaagacggagaaactcaaactgcggatcgtcgaaccgcccagggagaagaaggcgcagccgaaggtcgcgccccgcaaacccgcccgggggccgaaattgtaggacggcgggtagttctttggcaggaaggttgttaaaaatcgcacgtgttgtcgccgatacccggatgaaatcgttatatttgcaatcgaatcctccggcggcgtgccgccgggcgatttacatacggaaggaacacattatggtggggcattgaaaacagccaaattttaatccgctcgcaaaataatgggtagttctcttcttcatcgtcgtgtctatatgcgtcaagcgtatgcgatagcggcgtggggagaaattatctatcgagtggatgggtgcttggctgtacctcaatgccggtatttaacgtattctcacgcctttttcgtatggtatttgtctgaacctaaagaaaagcgatatggaaacgaaatcgacaaatgaggtaaagggtgattacgaccgggtatcggcgagtgaatgcctggggtcgctaatcgagttgcacgggattgtcatggaagacgatctgttcgtcattcccgatgcggatggtacggcagtattatacaatgacgggaagatacgttttgacgagatcgccgacatcgaggtcggctcggtgttcgtgggcatcctgctccgcaacggctatctgttctacctttcccgtaccgaaccgctcaagacgtgcatatacacgcatggcgggtggggttcaatctctgaaatttctccccgtggcattgccggacatatcgggcgtgaactgcacgggaagctgggcgaccatacggcggtcgattgacgggaaacaaaaaaatcggacggttgttatcgtccgatttttttcgcgtcgtattttcacggccgttgcctgccttgttcccgtttccgcctttgcagggcgagcagttgccgcaacatgtaggcatggttttcccccacggtatgccccgagggcatcaggtagggacttgcgaggcactcccggcattggcgtaccgcctcttttaagtcggtaacggttatttccgctcccgtgatgtctttaatctttgtttccattcttgtcctgttttttgggttcgtaccaactgtcccggtaattttctcccacgagcgagaaaattccgctcatgccgctttcagcggcgaaatttttggcttcccatataccggaaaactctcccagcagtcggtagccgatgaataatttgtacttgcgcatgattttatcgtttttccaggttgataatcggtgtgttcttttgcagccattccttcacgctgtccatgttgtattcggatgtgataaccgccgttcggtcgtcgatttcggtgaagcgcgtagtttcatacccgtcgatccactgcttcagcgtggcaacgccccacacctgcgggtcgtcgaacatggtgtcgagccgcccgataccctcgccgaaggttacgagcagcgtttcataggagatttccttgtttacttcattcgttttcatattctcgctttttacgggcggcttttgccgccccgaaattttttaatcagataagttccactttaaccctgctcatgttcgcccagaacacgccgttgcagtagtaggcgtagccgttatgccagttgctcctgcggcgtatcacgtcctgctcgggtggtcgtatctcgatactcgtggtgtagatgttgtgtcccacggtaatgacgaggttacaccttcgccatatctcggaatgggttctgaacccgtttttcccctcgacgagcgcaatggctgtcttgactgcttcccgaacttcccaattccattccccgaagggtttgagcgggcgtgccatgtagcttttatagatgattttcattgttatgtttttttgtagggcggctttcgccgccccgattttataattcgacaatcctttccactctgccgtacaacatggagcgtatgctcgtcttgtccacgcccttgtattccgtgtaatgcccgtactgctttaccacgaatgttttcagtacatcgacaaagttgaaacgataccctaaaagcggaatggagtccttgaaataggtgttatggtttacctcacgggtaatccagtctttctcctcacgggtgagcgttcccccgtcattgagccgtttgcgtaatatgtacgcttttgagcctgcaaggctttcgagtgcgggaacatcccacgacacgaatttatatgctatttggttcattctattttgtttttgcgggcggctttcgccgccccgatttttatgctgtcattcgtttccgtataagggacatgttccccttcatcagtttcagtatttgcccgtggtatggggtattcttgttacacacgccacggctctgcacgacctccatgcgttttagggacacctctatcgtttcgatacgtttgccgtcgattgtggccgagagtatgagcgagtcggctttcagatagtattcgttggtaaacacgcagtggtgcatggcctcgccctcctgccgtatggcttcaacgctgtccaataccctgatgcagatttccccgtcggaaaactccactccgaaaaaccgccctttggctttgacaaacgaggcttcctgttccaacgccttgcgccgttcctcctgccgccgttccatttgcatgtgccgccgttttttagccatgtagaggtcatgcgctgcgggcaggtctgcgggacacacgaaatgggcgttatgcaggtctttcccgaaaaatcgcagcaggtcgatgtagtcgcaccattccgtcggtttcccgatagcgtacccgttacggatggcgatacggatggccggccaatagtctgcgatattgcgggaggaacgggcgaaaaatcgcacgagtgccgtttgtcccgctttaagcagcgtttcggccttgttctccgagagcagcaggtggataaggtcgaaaggggttacatcggggagttgtttgccgtaaccgcttcggcgcagttcggggataagccgttgccggggatagatgcgtgtgggcgtgatgttgtatttcccgtcgttctccgcccgcagttccaatgcgctcgaccaactccacccgtgaacgaagaagcccatcgggcgcagccgtgcgaaggttgcggagcgtccgtcgggggcaatccaccgctgtacggcttcgatatgggtgtaaacgggcgtctgtcccactttcgcccaacactcgatatagacgaagcgcagtacttgaaaacccttgcagcgggttacgatacacaaatactcgtaatcgttgaacttgcggcgcagggtggtttccactttcagcgtggtgtggcagtgcggacactcgcaccctaacagattgtccgtgagttctccgttttcgctctgccacgtgtggccgcactcggtgcaggtgataagtcctttcggcgtgcggcgtccgatatgctcgatgcagttcttgtacccccattcgatttgtgcgggggtaagcggcggcaggtgtttgcttgccgccacaacgctctgttggaattttgttctcggtttcataactaaaatagactgggcattagtttgttatcttcgattttcttgggtttggacttggctttcgccaacttggcgtaggcttcgctctcggccttccgtatggcgttccgccgtgcctcggctttttcctcctcggtcagttcaacggtgtgattgaccactaccttgcaactgacgggtttgccgatgtcgatgtcctcctcgtcgtaatagtggagtgccatagagtatatttcctcgtcggcaaacccgttgcaaccgctctgccgtacttggttgatgatgaaagtgcagcaatcgtcaatgttctttttcgggttggcgtatcggggtgcgaaaagttcgtcctcccgtgcccgtgcgtcgagatagttctgtatcgtcagtttgaaataatctgttccttgtgccatgattttttggtattgtggggcggcgagccgccccgtgttcaacatttattcgtcctttccgagaagccgccgcacctcgtcctctttggtcttttggaaaatccatcccgctttcttctgcccgtcatgcgtcagccgtgcgttgaagcgtcccccgaatgcgtgaagggcgtccttgacgggcttggtgtccccgaatacggctatcgccttctcggaatagtccacgatgataaacccgccttgcacgctcgtttcagtgcgttccgcccgtttttcgtctttcggctcgggcagacatatattctcctcgtttcctgcgatatatgccagcctgtcgatgtacccttcacgggtgtagtgggtcagtttgcagacactccacccgtatttcggacttttgccgagcgtgaaaacgggatagcggtgttcgttcttggggtcgtattcggagaggtgcgccgtttgcgggaaattggccgccgcctttctcaactccccgaagccgttgcgggaggtggccgaaaagccgagaatgacggtacgcacgcttcgggtggtcgaacactcgtaagaggggtcagtgtattccgtttcgttgagttcggcgatgattacgccctgcaccccttcgggcatgatgcggcgtaacctctgcgctcctatttccgctatgcggtcatgctcggctttctctttggcggcggcgatggcctgcgccgtggcttgctcttccgcctgcctcacgagcaaagccacctcgaaagcgtccatgaactcggggttcacgtcgtcgtagtacctgccgataccgaatgtttgcgagaggggtcgcaaaatgtccgtttggctgatttcctttgtttcggtatcgaccatgtggtacacgtagccacgggcggtgtgttccaccttgtaaacgacgtaacgctttctgctcgcacccgcaccgataccgatgattacctggttttccttgactacctgcacctgcgtgtccgtggtagtcgctccgaataatgaaatgtactttgtcatacctgtaaaaatttagaagatgtgagtgaataggaaatagaaaaagccggttagagccacgagagaaacaaggcaggagaaaatgccccgcaggatgtcataacagaacgtgaagcccaaaacgacccaaataaagtcgataccccacacgtggaagcccaaagccaccgccccgacctttaccgccaacccgacctttgcctttatgccaagtggaaggttggaggatttctgtttccatttatttttctcttcgtttctcataacctttgactttttttttatgccgtagcggagccggtatggatggaatctgtttcggtagcatcaaaaggtgtcggggatagctgctgcaagattttgtcggaaaatacgctcgcccgcagggaaagaggaagattttgcggcaaaccgccccgcggcccgatcttgcagcagcgtgagccccgtaactacctttgctactgacaacagatttccataccgcgctccgcggcatgaaaaaaaagagaggaaaaggttatgggagagaaacggggagaaaacgatatgccgtgaacgctcgcgaaagtcggttcacggctcaccctgcatggaatgataaatcgcccgcgaacatttcctttcacgggcgattggcgtatcggagcgtgccgatcccgtatcggcggaggatcgtttccgccggacgtggcgccactcgctgccacttttaagacggatacgtccatatgccactggctgataacaagatactgtccatttgtgtacttttgggcatccgggaaacaaaaaatgaaacagaacatggaaataataagtatggacgtgaaggctttcgacgcgctggcagggcacgtggaagccattgaaagaaaagccgaggcgttatgccgcaggcaggaggacgtgagtttgaaaaaatggctggacaaccaggatgtctgtgacgtgctgggtatatcgaaacgtaccctgcaaacctaccgggagaaagggttgctgcctttcagccgcatccgtcacaaaatcttctacaaaccggaagatgtcgggaaactgctgcaatcgtcgcactatcctaataccgccgcgttatgagccattatttcatcgacaagcacgatccgcgtgtggcggatctcttccggcgtttggaaaaggccggcaaggcactggataaactggaatcctccggaggccggacactcaagggagagcggttcgtcaccgacgaggaattgtcccggctgctgaaaatcagcaggcgtacattgcaggaataccgcacggcgcggatcattccctattatttgattcagggcaaggtactatacatggaatccgagatacagaaattcctggaagattcccggaagaaatgtatcgggggacaggaatgggtataaaagaagaacggccaacgttttggccgttcttctttttcagttcaatatcgtgttcatgccggggagctgccagacgacggcggtcgtcgtggcccttcggacaagccaccgtcggaaggcttcggcattcccggattttaagcggaaagccagcgcggcgatcatttcgagcgaatacagctcgacaataccgccgtcacggttgcgctcccggcggtaaaccctctcctcacggagtatgccgcttttgagtatggagcggatgttgctccccacggcaggaacgaagactccgaacaggtcggcaatctggtggcgcgtgagccatacacggttctccggcgcgtggatttccacccgcccgttttcaatgctgataggttctcttgtcgtcatagtcatacaaatttatcaatttttgttatactgttcaaccgtttaccgttataatatctgccgtttccggttcgtcctcctcgtagagatttattttccggcctttggtctgttctttcagccgtttcatgtcctcgtccaccttgcggtcggtcactttggcgtaaatctgcgtggtggaaatgctcttgtgtcccatcatgcggctgacagtttcgataggcacacccaacgagagcgtgatatgtgtcccgaaattgtgcctcgccacatgaaaggtcatgtcgaagccgtatgtccgtcccagttctctggtgagcttgatgagatacccccggcaatagaggttgaaaatcctgtcgcttttacgctcgtggcggtatttctcgatgatctgcaacggcacgttcagcaggcggatggccgagggcgtttcggtcttctggcgccggatgtgtatccagtacgttccgtcgtccgactgcgtgatgtctttttcggacaagcgtttcaggtcggcgtaggacaaccccgtgaaggtagcgaagagaaaccagtcccgcacccgctggaggttgggtttatcgacgggagtttccatcagctttttgaggtcttcgagtttcaaatggcggctcttgcgccggggcagttccgggtgcagcttcccgtaagggtcgcgccggagtgtaccctgactgacagcccgcttggtcattttcttcaaccggtaaagatgctcgtgtactgtcttgggtttcatttcacgatctgtacgcaggaatatttcaaaatcatcgtagaattcccggtcaaggctccgcaacgctacatcctccttttccttcctttttttcacgaaggaggctaaaatattataggagttctcgtaactttcataagtttcttccttgcgatccacgccgacacgcttgcggaactcctcgttatgctcgcggaacaaggcaaggagggtgaacggtttctgcccgattccttccacggcgtttttgaccagctcggccgtcacgaaaccgaggcttttacgaatatgacggtaatgtccggtgattttttcggtcagtttctctattgccaggtttaccgttcgggcgttctcgcttcgtccgttcgcccttttggtttccggattccagagcgatggatcgacaaacgcgttgatattgatcggggccgacttggcgtcgatgcttaccttgcataacaatttacatgttccgtccttgcggactttcgtgcggttgatgtagaacagcagggagaacgtgctgcgacgttttatctctttattattcgtttccataatcgttgtgaatttgattgtcaatgatagattaaatagctacggagaagcggccggcaatcttttcctctaaagaccgggtatccatgtcgatcttgtcatcggtcactttggcgtaaatctgcgtcgtggaaatgcggctatgccccagcattttactgacggtttcaagcgggacaccatgcgaaagcgtgatctcggtggcgtaggtatggcgtccgcagtgaaagacgagcttccgttcaatcccgcaaatggcggcaatacgtttcagcgtccggttgagttcgttgttgctgtacatcggcagcagtttcccttccggggccatatcccggtacttgtcgaggatgagtaacgggatgtcgagcaacggcacttcatagtcgattttcgtcttcttgcgggcggtcttgatccatacctcaccgtcctcggccacttccagatcctccgtcgtcaggcggcacatgtccccgtaagggatacccgtgtagcaggagaagaggaacaggtcgcggatatggtagagcttcgggtcatgcaggggtgtggtcatcagccgttgtaactctgcggcggtaaggtatttctgttcccgctcgggatgttcggcttcataacccgcgaacgggtcggcagtgataatcccttccgcgatggcttccccgacaatcgtgttcaaccgtgtgacaagcaacacgatagttcccagggcaaagcggcgctccgtgcgtaggtagaggtcatagttgtcgatgaatgaacggttcagggccgtgaaaggaacatccgacaacttgtatttctcctggatgaaagcagccacacagttacaagcatagcggtaagattgcgctgttcccttttcccggttcacgccgacacgtttttcgaaatgttcgatgaacgtccggaaataacccaacagggtttcctgcccgaaagccgtccccaacaacagattccttatttcttcagccgttacattctcacgggtggctgacagttcgtcataaatggaaatggctgaagctcgcaaatcgtccagttgccggttgatttcccgcgcggcgttacttttacccgtggcacgtccggatgcccacagtgcagcgggtacggacattttcgcactaaaagccgcttctgaaaatttgccgacaacaagtttcgccatgaccgggcaatgtccctcgtcattcatttcgctctttttgaggtagaacgtaaccgttacatccgtctgtttcataactctattttttatgttgcaaaattacttgatatagagttatttacagttatgaaaattatagcggaacaaagaataaaaccccggatgccggtaacataacctgtatttccatgaaaaacggaaaaaaacggttatctttacgggcaaaatatagggttctttgcatggtgaacggtaaaaccgcaggtggtcaagcgttattttgccggattatccggggctaaaaaaggcaacggataagtagcaaatctttctcttaacctttcattatcctgcattttagcgatttggaaaggcatagaagaatttggcttaactctcctcaataccaaacacttactttatttatccaaattttgccgtttttttgcgagttctttatatatttgtgcagttatcgaaacggaaataacaatttaatacataattatatcaacaagatgaaaagaacattgtgtttcatggcactgttggccggtgccgtaattttcgcctcgtgcagccgcagcaacggttcgatcacgatgggcagcaagtcgcagttcgactctttgtcgtacgctttgggtaataacgtcggagcgggactcaaccggatgatgtcggatattcccttcgatttcgacgcgatgaccgaaggtgtgaccgaaggtgccctcggaacggcaaaaatgacgcatccagaggcactcgatacattgcgcacgttctttatggttacgcgtccggaacgcgctcaggctattgccaagaagaacgcgatgactcccgattcgctgaagacacccgaagagtcgttggccgatcccgcgatgttcgagagcgaggaggagcgtcggttcatttcgtatgctttcggtatcgatctgggtaacaatatgctgggagaagaccttccgattcagttggtttggtttggtcagggcttgaaagacattaccggcaaccgtgaagaagcccgtatgaccgagcaggaagctgtcaaattcttgcaaaattggtttatggtagttcgtccggccgaaaataagaaagccaatgaagagtggatcgcttcgatcgagaagaaatccggcgttcagaaaaccgaatcgggattgctttacaagatcgaaaagaagggcgatgaaaccctgatgccgacggactcccgcgaccgggtgaaagttcattacacgggaaccaattataagggacaggttttcgacagctcctatttcgagaacaagcccgaagagatgaaggagtacctcaagcagatagatccggaaggttatgacaaggacgaagctgtcgagttcgaattgggacaggtgattcccggctggaccgaaggtttgaagctgatcggcaaaggcggcaagataacgctttggattcctgcggaactggcttatggtcggcaggcgcgcggtaagtatatcttgcctaattcggctcttaaattcgaggtagagttggaggatgtgattcctttcgtcgaggaaacgaccccggcaacaacggatgaagctgcggctgcgacgactcaggcagcgaactctgctcttccggtgaagaagtagtcgcctcccggggaccgaaaaatagccgacctttgtagggtcggctattttgttgttttagagagcggatggcttctgccttcgtgcgtgaaaaattaaaagggcaggtcgtctacttctgctgcgggagtactgtacgatggctcttcgagcggggctgcgtcgggcatcggcgggatcccggcgttttgagcggtttctttgggttgcaggcgccatgcccgcacatcggtataccagcggccgttatattcgcgggattcgacgtttaccgaaaccgtataggtagccccttcgcggagtttggccacgtcgctcggcttgttgaagaacgtgacgcagattttgcgtgaaaattccgagggcagctcgaaaaccacgtcctgacgctgccattctccccgggcggacgtaccttgtgtcaggggcaggattttatatacgacaccttcgaattccataaaaacagtaattttagtagattacaaaagtaatgtttgtgccgcaaacccccaaattttttccgtaaaagttcttttgtcctgtttcgggccggaccggatgattggtcgtgtaccatcttgcgtatgctgccgattccggtcggcagcttcgggccggataaagcggatgtcccctgcgctttttgacgacggtcggagtgtgcggcatccggcgaatgcggaccggtgagaatcgggtgccgaaggagaataaaaaaggattcgccccaggcgaatccttttttattttgaagcgtcaaacggtccttcgaactatttggcggctttcttatcgtagcgttttgcgtaacggctcataaacttatcgacgcgaccagcggtatccaccaacttcatcttaccggtgtagaacgggtgagaggtgttggaaatttccatcttatacacgggataggtttcgccgttcacttcgatggtttcttttgtcgaaacggcggacctgcacaaaaacacgtggtcattcgacatgtctttgaatgccactaaacgataattttcgggatgaataccttttttcatttcgtttgttttgtttgtaattagatgcttaagcggagcaaaggtagtaaattttttccagttagctaattttccgaagaaaaatcttccgtacagaggcgattgccaatgccgaaagttccgggatgccttcttatttctgttgtacggaaggggaaagagccggcaatcgcttcggttgcaggagggtatgcggcgatgaaaaaatgggcttttattttgtgaatccggtcgaaatgtctatttttgtgtccgtattcggattttcccgaatgcaaaaggacccatagctcagtcggttagagcagcggactcataatccgaaggtcgtgggatcatgcccctctgggtccacttgaaagtcagggagttgcacagtgtgtgcgactcctttttgttttttcattgcggttttatgcaagtgtaggctggccgtgcgagccatgagtgcaacagttgaagtcgttgttttacaggcttgaagtattcaaacggtaaattcgcattgatgttacgcgctgcgtagggcgaaaagcaggtgttcgaacgttgggattccgggaagccctgtctgttagtattttgagaagaaactaccgcctgtatggattaccccgatagagtcgctatttcaaattgattgggtaactttttgcacaaaatcataattttacgtatttttcgaaaaataaaccataaaaatccatagaaacgatgcgagcaaaatacctggggctggatcttccgagtccgatcattgtcagcagttctccctatacctctaatgtcaagagcgtcgagcagtgcgctgcgagcggtgccggtgccgtagtgctcaaatccatattcgaggagcagatcctgcatcatgcggcggcgctggacgccgtatccgattcggcttacggcgatgcggaggtttatttgcagcgctatctgggcgaggattacaaggccggatttctccggttggtacaggaggctcggtcgaagacggatcttccggtaatcgccagcatcaattgcgtggccgataaaggcgattggatcgaatacgctacagcgatggccgatgccggagcttccgcgctggagcttaatattttcatccaacctacggacattcacgcccaggcccgcgaactggagttgaactatgcggagatcgtcggccgggtggccggtgcggtgaagattcccgtttcggtgaagctgcccatgcgcctgaccaatgtcttcgccttgtcgagcgctttgctcggttacggggcccggggtgtggtcttcttcaaccgcttcttcgagccggacgtggatgtcgagcggatgactttcgtggagagttcgccttacagcgagccgacggaattgcgcaacgtcctgcgtatggtggcgatctgctcggccgtgttgccgcagttggacctttctgtttcgacgggcgtgcacgatggcgaggctgcggtcaaagcgcttttgtgcggagccgaggcagtgcaggtctgcacggcgatccaccagaagggattcgaagtcattgccgaaatgaacgagtacatcgaccgttgggccgagcggcagggtttcggttcgctcgatgagttccgggggcgtctgaatttcaagaacgacacttcggccatgttccagcgcgtacagtatatgaagtatttcccgtcggaggcgaaatagtatttgccgaagtagtttcggttttcgataacgagcgagccgtacagttcactgtacggctcgcttttgtattggtgttttccgcttaatattcgatcttgtcgagaatcccttgcaggtaagcgatcgccacgccgtagttggtcatcgggacgcgctgggcgcgggcttgggcgacgcggctcaatacgtggcgccggttgaacatacaggcgccgcagtggatcaccaggtcgtagggcgtgaggtcggcgggaaagtccgtgccggcaaccacattgacccgcagtgcgggtccgatccgtttgcggagcatggccggaattttgacccggccgatgtcttcgcccaccggagcgtgcgtacaggcttcggcgatcagcacgcgggagtcttcacggagctgtccgatggctgccgcgctctccacgaagtagtcgatgtcgcccttgtaacgggcgaagagcaccgagaacgaagtcagcaagcttgcggcgggcttctgcgcatagacagtcgagaaaacctgcgagtcggtgataatcagtttcggcggtgcggccagcgacgagagcgtgccttcgatctggtcggtggtacagcagaccacgcggcacttcttatcgagcagctcgcggatcgtctggacttgcgggaggatgaggcgtcccttgggggcctggatgtcctgcggcatgacgagcatcaccacgtcgcctgccgaggcgaggctgcccgtgatttcgggctggttgtagtcttcgggcaggttgcggatcagggcttcgcgcagggcgtcgagtcccgtgctgttcgaggcgctgacccggagcggccgttgcccgaagagtgcttcggcctccgcatcgggcataccggcaaccaagtcggccttgctgcgtaccactaccgtcggaatatgcctttcttccaagagtcggaaccattctatttcgtcgttctgcggcacggcttcggagaggagaaggacggccaggtcggtcttctccagcatcttgcggctttgctgcacacgcagtatgccgaggtcgccttcatcgtcgaaacccggcgtgtcgatcagtacgcaaggtcccagcccgtgtatctccatcgtcttgagtacggggtcggtcgtcgtgcccggcgtcgcggaaacgacagcgctctgttggcccgtgagggcgttgatcagcgacgacttgccgctgttgcaccgcccgtagaaagcgatatgcagccgttcggcgcggggagtctgctcgttcatcgtgcgaaacttttagaagcggaaatcccgtttaccttcggcgatcgctgcgaggttcttctctgtgatgcggcgcacacgctcgttgaggagcatcggaacctctttcgcaatcatcttttcacccagggttcgggtttcgggcgatgcgtagtcttcgagatactccttgagggtcatcagggcgttgggcgtacagcagttggcgatctttccggtcttggccagcgacatgaagcggtcgcccgtgcggccttcgcggtagcaggccgtgcagaagctcggcacgtagcccagttccagcagccaacgcaccacttcgtccagcgtgcggtgatcgctcacgtcgaattgtgcggaatcctgttcggcatgcgtcgtgccggcgtaaccgccgacgctggtgcgcgagccgccgctgatctgcgaaatgccgatttccaacacctgctcgcgcgagcgctgcgattcgcgggtcgagataatcatgcccgtataagggacggcgatgcggatcacggcgacgatcttgcggaatatttcgtccgaaatggcatccgggaagtccttggtgtcgatgtcgtcggccgggcagatgcggggtacgctgatggtgtggggaccgacgccgaagcgggcttcgaggtgctcggcgtgcatgagcagtcccgtgaagtcgtaccggtaggtattcagaccgaacagtacgccgatgcccacgtcgtcgataccaccttccatcgcgcggtccatcgcttcggtgtggtaggcgtagtcgctcttcgggccggtggggtggagtgcttcgtaagcggttttgttgtaggtttcctggaagagaatgtaggtgccgatgcctgcatcgcgcagtttgcggtagttctcgaccgtcgtagccgcgatatttacgttcacgcggcggatcgccccgttcttgtgatgtacggagtagatcgtcttgatcgattcgagaatgtactcgatcggattgttgcgcgggtcctctccggcttcgagtgccagacgcttgtgacccatatcctgcagggcaatcacctcgcggcggatttcgtcctgggtgagtttgcggcgcggaatggttttgtttttctggtgatacgggcaatatacgcagccgttgatgcagtagttcgacagatagagcggcgcgaacattacgatacggttgccgtagattttctccttgatctgtttggccagcgtgaacatgcgttggttcaggtcttcgagttcgcactcgagcagcacggccgcttcgcggtgcgtgacccctttgccttcggccgctttttgcaggatcgcctcgatcagggggcggttcgcacgattttcgcgggcgtaagccagcgtttcgacgatttctccgtcatggatgaactcctccgccttggaggatgcgacttggtacatatctttgtgtttttataagctattcttgataatctccccggctccacgagatgtggcggccgatttcgttgagctcccgttccagagcggccaatccttcggcagcttcggcaccgaaggcggccttgccgtcgtagaggttgtatttcgaccgttcgtccggcggcgaaaggttgggcatcaccacgttggcaccggccaaaataccccgcatccggccgttgcccgagagggtggcgagcgcggtggtcgaaggaatcagtgctgcgggacacatcagccgcagaatcgacagcagggtgagcgttcgttcgacgcttccggccggttcgtggccgaaaggggtgtcgcggtgcgggatgaaaggtccgataccgatcatctggggttcgaactcccggatgaaaagcagatcccggaccaggtcgtcagtcgtttgtcccgggctgcctaccatgatgcccgtaccggtctggtagccgatctttttgaggatgtgcaggcattcgatgcggtgatcgagggacatccgggcgggatggagccgacgatagtgatcgggagtgatcgtttcatgccgcagcaggtaacggttcgcgcccgcttcgaacagcgcccggtaggaggtttccgtacgttcccccagcgagagggtgatggcgcagtcgggccagcggcgacgcatttcccggatcaatccggtcagcagttcgtcgttcagagccgagtcttctccgccctggagtacgaatgtccggaaccccagccggtagccctcttcgcagcaggccagtacggtttccggggtcagacggtagcgttctgccagacgattgctgcgtcgaatgccgcagtagcggcagtcgttgcggcagtaattgctgatttcgatcagcccccgaacgaaaactccgtttccgaaatgcacacgggcgacctcgcgggccgccctgtgcaggtattctctctcttcgggggacgcatcggtcagcagaaggcgcaactcttccggggaaagggtgcggttgcgtttcaactgatcgacgagctctttcatagccccgtcggatttagcgtttagccagctccttcgcgaattgccgtttaccggcatcgtgcaggttgtgggtgctgggacccgtgatacatccgccttcgcaggccatgacctcgatgaacttggccggggctttgcccgatttggcataggcgcggagcagggatacgtttttcttgttcaggttggagacctggatgccttcgacctgcggccggttgttgtccgccaggaagagctgtacggcgcccatcacgcctccggcctgtgcgaagccgtgggcggcccgggtcgaaacgaacggaatggggaacggatcggtggttgcgacttcgatacccaggccgtcgaaaatggagttgatctcctcgaaggtcatcacgaaatcgacgcattcgtcgcggcgtgcctccttgcgtttggctacgcacgggccgatgaagaccacttgcgcgtcggggtgtttctccttggcgatccgcgcggcgtaatacatcggcgatccggtgctcgaaatgaagggcttcatctcggggatatgcttgttggccagttcgacccacgaaggacagcaggaggtggtcatgaacgcctgtccctcctcaattttctcttcgagttccgcaccttcattgcggatggtttccatggcgccctgcgctacttcgatcacgtcctcgaaaccgatggccttaatcgcgccatatactttttccgtgggggcgttgtattgtccgagaatggccggagcgacgacggcgaccatcttttctccttcgcgcagacgctgcagcacgtcgaacacctgcgaaatttcgaagatcgctccgaacggacaactgttgatgcacttgccgcagtagatgcatttgctctcatcgatatgctccacgccgcgttcgtccttggtaatcgcctttacggggcaggcctcttcgcacggtacgggcatatagacgatggcatggtaggggcagttgctgtggcagatgccgcaactgatgcagagatcgtggttgatgaccgctttgccggcacgattgaattcgatggcgtttttcgggcagttggtggcacaggcccgggccacgcaacctttgcagaggttggtgatctcgtagttggtctgcacgcacgacgagcaggcttcgtcgattacgcagagaatattgtctttctgctgctgccctttgcgctccagggctttgcgggcatattcggacagcggggtgagttcgtcggtttcgtcggacatgtcgaaacccatcagcgggaaagatttgtatttccacacggcgcgctccttgtgtacgcagcagcgacccaaaacccgtgaggtacggggactcaattcgatcggcaagcggtcgattcgctcgacgagctggttgtctttccacaatttgatgagattggtcagcaacttgtgtctgacaatcattacgttattggtaagaggcatgtcggaataatagaatgttaaacgaaatttccgtcgcaaagataggttattacccgtatgttcacaaacaaataagtataaaaaagagagtaaatattattttcggataattttgattttcaaattttatataatatattgcaatacacatgaacggcatttatgttttgaccatctaatcctaaatattatgcttatgaaaaaattattactatttttaattggtggtatcttgttaatcggcacttatggttgtgctaattatgaagaagatttgttggacgaaatttcgccgaaacaaatgttagctactgttacgaccgaaattgagttggcggatgcggtgtatcatagagacacagtcttggatccggccgcagaatgatccgtacaggcttgagaactttcagcaggcgtacgacaatatagtatcgggtgaatcgaaaattgtcagggcatctgatgagtttgcagcaagcgcgcggagtgtgcgaaaagaattctcagcaactgccaaaacgcagttgaaactgaaagctacccactatgccttgaaaatttttccaaaaacggaagaggaacaacgaagccttgaactggacgagcagatcaagatcgcgtatacgcctttcaattatacgtcattacctgatgaggtgacccagagtcttgtgttttcgaaatcccggacacagttttgcgaggaagatgaggagaggcgttattctgtgacttacgagggcggtatgattaaggatggaccagtggagcctgtgacaattatattgcctgtattatatgccgtttggcctgtcgaaaaaccgttccctgttgaaatggattttgaaatcctttatgaagttttcctccctaaatatattactcttggtgagaatggattgagtgcggaggcaatacaaattttggagcaagaagccattgctttggctttagatgaagagagacatttaccaggtggattcccgcgcggaaaagtactatgttacgatactcatttaaagcgttatgtaccgctggagaatctaaaaatccgttttacgctgggttcgaatattgaggaggtttatacagacaaaactggatattatgctatcaacaataaattgatcgacaaccaggcaacggtaagttttgtttttcagcacgaaaaatggacgattgtcaagggttctgaggaaggaggacggatagaggaaataaagggaatttatggagaattaagaagtggtaaagatttgaactttaatattaactcttcttcggctccggatccccgctacgaaattcatcgtgcagtcaatttttatcattatggcgaacacgattttataatttctacttttgttaataacagaatatcaatagttgcattagccgttgatcctggtgggtggcaaggccgatttaattattggccgacttctgtggggagaatgccttttatacaagttggcaattgtaacaggaataatcatccgagactaataggaaccactttgcatgaattgggacattattgtcaatttcatttgcgtggcggcacattcagtgcgtacgatggtacttggaatatattgctcgaaagttatgcttcttatgccggatggcatatgggagaagcatattatttaaatcagggttggaaaaaaacatctctaaactcggatataacaggtcaagcaaggcaagaatgggattatcaaaatacaaccaataattattatactcctttgtttgtcgatttggtggatgattacaaccagggtgttggctatccttctcgctgctacgatcaaattaagatgcctcaattcgtggtgaatttgtttggagcctatagaacctggaatgattttgaaagtgcacttcgtaagtatacagggtcatattttacagaaaatcaaataaatgaatttcttttttacgagcgtagctggcttcaacgtaacggttatatataaaaatgggtttatgaggaaattcttattttttgcgttgtcggcgatatttaccgcagggactccggcaggttgcaataccgattacaatgcaatcagttattttgtgtgggtcaacgacagcgatcataagatcactcttttcgtagaatccgatttagggtgtgagttcaaaaatgaagtgatactgcctggagaaagttttactgcgatggataatggtatgggtgtttgccccgttccttcaagttacatttggaaaatgacgattattttcgacgatgggaggcttggattcacttatggtgtccgttattaccaggacgacggtcggtcgtaccctccgaattacgacgcacattacgacccttcgatcgatgataattatgtattcgaggatttgaggggtaacggtcgtcaacctaaagagcgttggacttatgtcttcaccaatgccgattacgatgcggcggaggcgatggtcccgttcgagtaaatagtttgtggctctgaaaaacgaacgcctcccgaatctgaaattcgggaggcgttcgttcgatggcggcctgtcttttggctctaacgatccagctcttggaagaagctctggaaatcggccatgaaaacgtccttgccccgcagtacttcccgcttggcgagcagctccgaaaggcggatgtagccgatcacgtaattgccgtcctcgccccgatattgctcggtgatgcggtcgaagtggaggattttcagtacgtcggtttccgtgtatcgcacataaactttcagctccacgtcggtcgtgtactccggacggtcgaggtagtgctgtttcttgtattcgtaccggtagtcgtgctgacgggccatgatgtcgctcaggatcgacgaggcggtaggcaggctgccggcgcccttgccgaacatgaactggcggtcgtagcattcgccccggatcaccacgccgttgtattcgtcatcgacgctgtagatgtatttgccgggggtgacgaattcgggcatgacgaacatcgtgaacttccggtcgctgaccttgaccacttgggcgaccagtttgatcttgacccctttttcgcgggcgtaccggatgtccgagtcgtggatagtcgagatgccgtaggtgaagatccggtcgggatggacatacactccgagcgcgtgaacggtaatgatgactaatttgaagagcgagtcgtagccttcgatgtcgaacgaaggatcgctctcggcgaatcccaatgcctgggcctgggccagcgccgcgtcgtaggactcctggtggtcgaacacccgcgaaaggatgtagttggacgaaccgttcaggatgcctttgacttcgagcagcaggtcgttgtcgtagtactcctcgaggttgcggatcacggggatcgagccgcacgacgaggcgtcgtacagcagtgccacattgtgtttcttttgcaggtcgatcagctccggcaggtggcgggcgagcatggccttgttgcccgaaacgacggggatgcctttctggagggccgccttgacgattttgtaggaggccgccgcatcgtcgatcacctccacgatcaggtcgatctccggattggagaggatcacttccggatcggtcgtgaaataggacgcgtcgatgctgcggggtttgttcgaccgcacgcagatcttgacgatttccgcatgggcgttgcgggatttgctgagtacctggaagatgccttgtccgactacgccgaagccgaaaaggccgattttgatcttattcatgggttggatggatgaaagggttgaggattcggttcagttgttcgtgctcgaccagaaacccgtcgtgtccgaacggggagtcgatctgatggtaggtgctgcgcggcagcatccggtgcagcgcctgcatttcgggcacggtgaagatgatatcggtcgaaatgccgacgaccagacattcggccgtgattcgttgcagcgccgctgccacgcctccgcgctggtagccgacgtcgtgcgtgtcgaaagcgttgaggatcttgtaataggagtaggcattataacgccggcagagcttttctccttggtactgctggtaggtgcaggcccggcgagaggagaagtcgtcgttctcgtcccgctgcgagaggtcgtagccttcgggtccccggtaggtgagcagcccgatagcccgggccgctgcgagtcccttcatgccggcagtggcgtaaggttccccgaaggtcgaatcggcttcgatggccatgcgctgcgtttcgtcgatggcgatgctccagggcgacgctttggcggccgtggcgatcaggaccagcttgccgatccgctcgggttcctggacggcccattcgaccgcctgaaagccgccgacggagctgccgaccaaggtgtggatgcggtggatgcccagaatgtcggccagcagccggtgggcccgtaccatgtcgcggatcgtcagttcggggaaatccttgtaataggggcgtccggtcgccggattgacgtgcagcggcccggtcgtgccgtagtgcgagccgaggatgttggcgcagatgatgaaatgctcggtggggtcgaggaatttgcccgcctcgaccgtgtgcggccaccacgaggccacgtccgaatcggcggtcagggcgtggcagacccagatgacattgtcgtgggccgcattcagtttcccgtaggtgctgaatgcgatcgtcagttcgggcagaatgcctccccgctccaattcgaaaggttggttatgacggtatatattcattgtgtttacagtcgttttaatgcgttgccgatctcttctttcaggtcgtcgatgtgttcgatgcccagcgagaagcgcagcatgttgggataaacgcccgaagcgaccagttcgcgttcgttgagctgggagtgcgtcgtcgaagcggggtgtaccaagaggctccgggtgtcgcccacgttggccaggtggctgatgatctccaggtggttgagcagcgaggaggcttgttcggccgatcctttgacgcggaaggtcagtacgccgccgaaaccgttggtcagatacttcttggccaaatcgtggaacgggctactcttcaaaccggggtagtttacgctctcgatcttggggtgcttctcgagccactgagccatttcgagtgcattgtccaccgatcgctgtacgcgcaacgagagggtttcgagtccttgcagcagcaggaaggagttgaacggactctggcaggcacccgtgtcgcggagcacttcgcaccgtgcccgtacggcgaaagcctggtcgccgcagttttcccagaagttgaatccgtgatacccttccgagggttcgctgatcaaggggtagcggccgttgccccaatcgaagttgccgccgtcgatagccacgccacccatgctgttgccgtgacctccgatccatttggtcgctgcgtgcagcacgacattggcgccccatttgatcggctggcaaaggtagccgccggctccgaacgtattgtcggcgattaccgcgatgccgtgtttgcggccgatttcggcgatcgcctcgaaatcggggatattgaaggccgggttgccgatcgtttcgatgtagatggcccgcgtacggtcgtcgatgagtgccgagatgctctttgggtcgtccccttgtgcgaaacggacctcgatgccgagtcggcggagcgtgtatttgaactggttggtcgttccgccgtagaggtaggaggtgcttacgatattatcgcctgcctgggcgatgttcgtgatggcgagcatttgggcggccatgcccgatgccgttgcaacggctccggtacctccttcgagggcggcgatgcgctcttcgaaaacggcggtcgtggggttgttcaggcgggtgtagatgtaccccggttccgtgagggcgaaaacggcggcgctcttttccgcactttcgaaggtgtaggccaccgtctggtggatggggacggcgcacgatccggtcgctggatcggcctgttggcctgcatgtacttgcagggtttcgaaacggagattctgttttttcatggttttgaaagttgatttatgttttcgggattgttacaaacaaaaaaatccggctgaaccagccggatttaagagatacacgtacgacgaatcttacacccggcatttacacctgcgcatcgacatcatcatacccatcatcgaaaccgaaagtccgacgatcagcgagtaagaattattggatgtaatgccgtttttcatgcgggtaaaatacgggtttgttatcgtattgatgtcgcaaatatagttatttttcgtgaaatggtgctgtcgagagaaaaatattttacaatgccattatttcgatgcaaaatctattacttctttctaaaataggttgtaactcactatgatatattggcttatttgtaaccaataaacgccacttcggaggccgggtaacagacgggtaacagaatcgaatgaaaaaccctctcaacgcccgatctatcggtctgtcgagaggggtattcaacgcaactgatacggggctatcagtaccgcaaagataatgaattatttggatttctattgcttggtgtagattatcgcattctcggcctcggtcaagccataatcccacattttgaaagaggaggcgtcgatgaccttgatgttgcgctgatcttcgctgtttactacttcgccgtccgttccgtattcaaagaatgagatcgtcgggattgctccctcatattttacgtcgattgagtaatagcaggtcgatgagccgctgatctcttcaaatcgggtgtcggttatgacggcggttccgtatgctgtaaaatccgggaaaaggattaccgtcggcttgatctcttccggctcggaatagggctgaaagacgatggtttccgtataggaaccggcggatgataacttatcctcatggaacccgatatatctgccgttcaaagtctgccaaatctgtttgacggtttcgtccatctccggctttggggtatcgtctttggagcaagctgcgatgcaaagggataggaatagaatagataagagttttttcataatatgatggttttatgctttcagaaaataaacgggaataatcgggagcagggctttgtcctcctcgctcatgcggtcgtaatagcgaatccataggtcgatgaactcgtcgatgtcgatcagacgcaggcaacgatgcccgttgcgggcttctttcttggattcgctggtgaatgtccccgatgtaaccagcaggccgacctcgccctctttcacgagaacccccagcagactgcggacgacatcgacggagattgcagaggtcggataatgcttgacctgtactttcaactgcggggcggtcgtgccgagcgggtctcggtaggcgataatatcaacgccgccatccttgcctttcggggcgatgaatggcgtatagtagcccattgcccgcaacagggcggcgaccaaatcctgaaactcgtaagggttctttttgatgatatactcccgaatgcctttcgatgcctgaccttgcaacatatccaaatcatcgggctgatccgcattctcctcgatgaccgataccgcgtgctctttctgtatcttggaaaacttgccgtgaaaatcggcgaagaactctccggctccggcggcaagagctttcgcaccctcttccgtcagatgccaaatcccgctctttttgacgagatacccgaccttgcctacctctatcgaatagaagttgagatacgctttccagcggatgacgccgctcttggtttcctctttctcataatcggtcagcgggaacgatgatgcgagggttgcgtatatatccgaaatcctcatttcgccgccgttggcctcgattgctttcatggcggcaaatacgatctccgcctgccttgttggtttcttttcgctcatgctatccgtaaatcaaacattcgctgctgtttccggatatgcacacaaaaagcgtgggcgttcctgtcggtttagaggtatcgccaaacacctacggactaacaaggaaatgcccacgcataacgcaggcatttaccattgttttttaagtccgttgtgaaattggcgatttcctaaaccttaaaaacaatagcaaacgctataatatcaaaactttttcaaaggtacaaaaagtttctgaaatttggagctattattataatcggctgtattgttcgcctttgcgccctcaaataaacctccgaatcaagggaaaaatctttttacggagcagtacgagaatgatgataattgccacccaaaaaccgcgtatttgcgtctgttgccaccatgtcaatttgcgctctacctcgacgatcttttcaacctcgacctcccgatcccgataaacgatgctgtcccgatattctatcggccgctgcgtcggtatttcccgatcgtccgtcttgttttcgagcgagtgggatagcgacccgtcggggttgatccttgcgtccgataccgctgccgaggtttcgaggtggctcgaatcttggcggacggtctgctcggttcgctcggccggcagttgcacccgtaccgtgtcgggaatccatattgtgcgatgcctgatctcgacatgcaggctatcccgcattccggtcgaggtcgtcagatgtttgcacgggcagcaggccgacagcaaaccgatgataaggcacaaaatcagcgttctcatacgatttcgatttggattggttcgccccggtcggaggccgttttgagcatgtcatagacccgtcggaatgtcgccgtcgagttcagcaccttgccgacctccttgttttcgccgaccaatatgcaccccgcgctatcctcggcggtattgccgatatggatcaggatgccgtcgaactccggcacattgagcagccgaggcaggtagccgtcgcagaatttgtactgcgctcgatccttatacttcggagattggattttcagcgtgatgtcgtatgtcccataggggatagcggtttcggcatacactttcttttcgccattgtcgaactgtccgtttttgttcaggtctcgcacggcatcttcgatggtgtcgcagaccttttgcccgtcgatgtagagccagccgatggtataggtcggcttcaatgcgatgcgtttcaaaagtagtttcatagccacgcgaaaatttgaatgatgaaacctccggccattgtataggccaagtcaagccaatcccatcctttgtagcggtattggtcgaaagcctcttttgccacccctgcgatggcggcgaataagacgcatatttcagccgtatagggaatgacaagggcgaaaaaggccgcgattaccgcacccgcaatgaggtgcaggagtttgtcggatggaatactccccagccatttcaagatggcggtcagaatctttttgatagtttccatgatgttgtgatgttagttggataatagggttgctacctgaataccgcacttgcgaatagccttgccgacagcggaggcgtccatctgtttttgtccgcaaaatgatatgccgattgctccgagcggattttctcctgcatatagggcgagaatggcgacctcgttcacattattcgacttgaacttgaaatacattcgttcgtcgatctccttgatcgtttcgatagctccccaataaaatccgtcgtcaaagactttcccgataaaagggtatttcgatagctgaaaatcggtatattcgtcatcgacgttattaatgctgtcggcgacctcttcgattcgcatatcgccgtataggaacggtaatcctgataataggtttttgctcccattatgcagctctatgagccatgtacggtcggcatcgagcgcatataagagtttgcgcagcatcagacgaatatccgcatctacctgaatgcgcttggataccgattcatcatgttgctctgcttggattgattcgactttatccagcacatagcacggattggtgatagtgaggattacaaatcccgtgaggagtaaaagcaggagcacccgcagaaaacggaaaaatccgtacttctcctccattttgagtagcttttcaagccacccgattcctttttcaatcttctgttccatagtggatttaattttcaacaaaggtaataaatagtatctaataggtactattttgaatgggaaaattattatttggttctgacggcacttgtgattacgggtaggtattctataatgaagagctgtattatccttgtgatattttcagagtagttccgtctctccaaacctgtccataaacttttgggtcggaagtaggaataccgtccattaaaatcttcaaaattggataaccatttgtatttgtattttttactcctactataaaattaaccacccttgcattacgttggcctcttacccataaattagcattatctgaattaaactcagataaataacttaatccatcagggaagtctctatttaatgatatggcattagatgatatggcggcatatttattggctgcgcctccttctctcggcattatattaatgaaagatccgtttgcgtcggaggaccaaaaagctattagtgtatcattataatacatttcgatacgccgggaattgggattcaatactattcttgaacgatctttattcgtttcgatacgagcaccaataatattaaatgcgcctgaatcacctatattccattcgaatgctttattggcatctcctgctcgaaactgattcttgattaggtgccaaaaagattgaccgtcggatgatacaattttatcggtcgtgatgcggccgggcagaatctccgaaaacccatagagcgaaacatagctccgttcgccgtcatattcgctattcagaatacctaccagcagatgataataccctgcaacatcattcatcttgatcgctcgatcagagagcaggaaatcgctttttgcggtggtgtccgtgcggctgaccttggcatatagataatacttcttttcgccattgtcgaggtatggtgaaaggtattcgctcatctcccaaaccttgtactccgaatcggcatgagaggatgaaatcgttccgatgccgagcgtcatgtgctggatgaatccgtgcgggatatgcaactgctttgccgcattgtcgtaggtgataccgtcgtttaccgccgtgaggtcggttttgctggcgacgaaccggaattgcaggctctcatccccgacgagcatcatcatcgtctgcacggtcagcggattgatggagttcgtgaagttgtcgagcattgaatcctccaacatcgccattgtttccctgacatcgcggaaccgacgcttggtatagcttacggcgttgcggatgctgttatctgtcgccacctcattttgcccgatctcccgaagctgtgaagatacgctcttgcccgaaaccgagtttgagatttcgagaacaggggcatacggtgaggtgaggtattccttgatacccgtgatgcggattgctatgccatcgggaacgaactgctcatcggtgaacagaacatatcccccgactttcagccgaccacccacgcggagccaattctttttcgcccatagtccttgcagagtgccggtaaaggtgaatttcgggtcttcgttctcatagagcttacgggccgcttcacggaacatatcccatgatgcccctgtcttatccgtattgttgcagatataggcatccggcagcatgatcccgaaaatggcgtaagtgtcgccgacggcgggcttgaatgtttcgttcggcatcgtaaccccgtcgatctcctgcggtacgagttcaaagcggcgttccgagtggttgtatttgaactcgaactgcttatcgtcgcccgcgagcattcccttttggaaactgatcgtcgccgtctcgccctcaatgatatagtcgttgaaattcagctctgcggggatggagttgtcgatgatgtcgtagaaattcttcccgacatccatcgtttctacctttgataccgtcccctcgcgggatgggtatatttcggagcaatcaaggctgtcctccttgactgcatcggaaatcttgtcgatgcgctcgatggaatacccctccgcatcagattgataggtgcggccctcgtaaacgagcgtctgcgacttcggcaacagcaattccgccgagccgtatttcgagcggtcgatattgcggtctccgccctgaacataaagccgcttgatcggcaactcatcgctctgcgtggtgcgtccgacacccggctcgaaaccgttccccttgccgtatgcgagcggcaggggatcatccttgaaatactcgactttatgcagcgagatcgtatagtcgttgatttcccattcggtctcgaatttgtttgcgacatcctgcaatgcagcatcgacgtaggtgtgattgaactcgaccgtctgctccgccgcatcgaggcattcgccgactttccaaactccggccccgtcgcgctggttgagattccagacgatagcttcgacgagttcgtggggcttggcgcacatcgaccatttgaggcgtttatcgacgggattacgcatcttatacaggctcatgttgtcctccaatgttccgagggtgagcgtgtattcgatattgcgggttccgtttttcttgatgttttccggcgatccgagtttgtatttcacgccttgatactcgcaccatgccccgaccggaatttcgacaaattccgatagggagaatttcaggacgagttgcggcttggacatgagggagcgatagcggtagctgctatcgctctcctgtacgtccaacgtcgtgttgttgaaatgcagggtcagcatgatctgattttattcgatgttcagctcggcgcagtctgcgtcgatttgggctttcaacgtggctctcgctgcgagaaagtccttgtatgaggcgatcttcgcctttgcctcgtcgctcgacttggagccgccatatacgccgagattggcggcgttgtactcattgatgagcttctgctcgtagttggcatcccacattgcacggatggcggcttccgtgattttgttactcgtaacggtcgcccatacaactacctcatagcaggaatactgcttgcgcggagtttcggcgatgggtttctcgttcccctcggcaatgatctgatgttgcggggcgtcctcttcctgaatatcccaacggtagatgtagcttccgttgcctacggcctcgaatttagacggccttgcatcgtaatacgaacgtgtcatagaattgcgatttaatgatggtttttaacaaatgttttgaattggagactttcgcccatccgtaccaactgcatagcttctgtttgtagtctctcgcgctgatattgagtttcttattcagacgcgcggccatgcggcagaaattctgcttgatggatttgcgcatgagcgtttggttgtggtagaatacgaacccgacgaaatcgaggccgcgcccgtgcttgtccgcccggttctcggcaatcggaaatatctgctcattgcctttcaacgtcaatttcaaggctgcgagatacttcttgatgtcggccagcaggatgtgcagctcctctttcgtggaggcgagaaataccatgtcgtcggcatatcggaaatagtatcgcacccgcttctcctccttgatccaatgatcgaagtaggcgagcatcaggtttgcgaagtattggctcaaatagttgccgataggcacgccgtcggtgctgtcgatgatcgtatcgagcagggcgagcgtatccttgcatttgattttgcggcggatgatggttttcaatacgtcgtggtctatcgacgggtagaacttccggatgtcgattttgaggcaatatcgggcgttttcccggtctttgatggcccgcttgacattccgcatcgctccgtgaatcccgcggcccttgatgcagctatatgtgtcttttgtgaagaccgaaacccatatcggttcgaggatattcatgattgcatggtgcagaatgcggtcggggtaatacggcaatcgaaatatgatcctctctttcggctcatagatcgtgaacgtgctgtattcggagttcttgaatgtatgatttttcagcgtttcatgcagggcaaggatattcgcttcacggtttttgtcgtgaagcaagacgccatacgagcggagtttcccgcgccttgccttttcatcggcgaggcggaggttatccagcgatatgatcttttcgtataagtttcctatacgcttcatttcgacgctttgcttttcatattcggggcgttcggcagttcgggatgcccgaaaccgcctactaactcctttttgaggtgatattttttgccgagaggcagggtcgttgctctcaaaatttatgtttttacctttctgaaaatcattggcgagacctgatattcgcattcgtattcgagggcgtgttattcgaattcgcatacgcaaaaccggcattcgagctgttattcgcattaccgctgaacaggacaccgcaagagcaaccaacctttatacattactccaaatagtaccgcgttcccgatgcccgcatcgttacccgtcgcgggaatttgtccatttcccgaatcttggcgaggacatatttgatttcccgcgaattggtgaataacttgcgtgcatcgcggtcgtgatcgtcccgattcatcttgatcttgacgagcgtccgattctctccgaacttcgttttcactccctcgatgtagtcgcagacccaaaaggtgaggtttatcaacttctgctgcgtcgtttcggggcagttaaaatgcttgttggtttcgtcggcggggattttcaggaaatccagcgaaccgtcatcttccatcggattatggttattctccattgtcgtatcgtttaattattggccgagcgtgttttctgtggcgttatccgttatgcggggataaagcaaaggcgagacccgataatcgcatacgtatacgagggcgcgtaatgcgaattcgcaaacgcaaaaccggcatgcgagccgtaagacgcagcaccgccgaacaggacaccgcgcaatgcttcggccgtcgggatgttggtatagtggtagtcgcagaaataggtcgaagaaccgcctcctacgacggagggcatgatctctcctccctcgccgaaaatcacctctttgacatatccctctgcgcgggcctcgttgcctacatgggcgtagccgtcgtaaccgctatccgagaatttggccggatcggtgcagacgaataccttgctcaacccgtcgccgccattctcctcggtcgggctgatccggatgttgatgccgtccgtccattgccaaacatgaccgaaaggattctcgacaccccgatagcgcggaaccatgaccgtgcatcgggtcgatccgtcctcattgatgacggggtatgctacctcgcccgtgccgtttccgagttcgtcggtatggccgcacggcacgaacggataatagccgttgaatccgctccaatcggacatgttcgttacacctgctccgaggccgccttgtgcatagccgttgctgtccttttccgcattgaacgtcgcctgcgagttgagcgtggcatattcgatgacgaagagccaatacagttctttttggatgtcgtaggtcatgcagttccattccgtcgaaccggacttgcgtttgcgggcgtaattgcggaaattggtacgggagatacccgtcgccgggcgtccgaggaacgtgcgataggttccgtcatacgccgtattgttgttgccgcctcggtagtcggcatccatattcacgaccgagcagagggtcgtcgtgctgcgctgtatggtagcctgatacgccgaaacgtatctattccctgggacgagacgatagccggggagagggtactcgctgatgcgtacccgccgcttcgtgccgtcagtctcgaatttgcggtagtgcatgggaagttcgaccatgacctgaccccgcgagccgtcgcgcgtctgtcccgtccaatttgccggattgagatattccacgacctcgccgtcgtcgttgagcaggcagcctttcatccggttgtggatcggcaggctcttgtgcagggagagattgccgatacgggtgcaggcaggcgaggatacagcggtgtcgaactcgatgccgtagctgcattcctcctccatgtaaggcaggagcgttgcgagcgcggcctttttgctctcgccgtcctccaatacctcgcaaatgaggttgaacgggttggttcccgatacatcgggcaagtcgctcaatcgcttgccattctgaaaagcctcgataatctgttcgaggattgcttcttgttctgctgtcatagctatttgtcgtttaagaatttgaaaaccgtttttcctttcgatgcgatgaacatcaccgacgatgcggtattcagccgcattttcttttgcctacgggatgtcgcccattggcgcagccgccgcgatagggagatgaaaaccgagacgatcataccttttcgacgtaagtcccagctccccaatagaggtcgtgagtgttgagaaaatccgcattcggtgcgatggccttgatcgccatcggcgaccaatcgttgagcactaccggagcgtcggaaaattcgtcgtcctgatagcatttcacgctcaatacggcgtccacggtggagctgctgtatttgggcctgatgtagatcgagaacagcgcgtcattcggcaggctgaaaccgtctgcgaggttctcgatcttgccatgcgagaggatgcgcccgccattcataaattcgctgatgtaaccttgtcttgccatagcttgatgttgtttttaattgaacctgaaattaccgtttgccgtgaggcggatcgacgagagtgttaccaacctgaccgtaggcttcgagaccttgatctgaatcgtcttgtagagggctacgttgcaggtcgggatgacatggatgatgctggttccggcggcaaggatcgtaatgcgtccgtcgggagttaccgatacggccttatcgtcgccgaggaacaatacattcggcttgacgctggccggagtgagtgtggcgcggatgaaattctccgccatattgccgaccagcaggcgcgaggggtattctaccgtcattgcagtcggcacaagattcagcggttccaattccgcagcggcggcgatcacctcctcgcaatcctctttcgcctcaatcgcggcggcggtggcattgctggcgttcgtggttgcggtattggcggcggtcgtagcttcttgtgctttttgcgcggcattgatggccgattgggcactcttcgatgctgcatcggtgacatcggtggcatcttttgtcgccgctttcatcccctcgacgaccgactggatatattcgagcgacaccttgacgctcttgttgaatatatcgacaccgatagtccacagccctttgaatgaggtgcattcggggagttccgatattttcttctttatcatatccttgtagagttaaattctaaatacaatgaggccctcttccggctcggttatcactacctccttatcctcggtcgccaatacgcagtaattaccgtcgggccgcgaatcgggaaaggtcagggttacggtgaactcgcaccacacccgcccgttgcggcgaatatcgaaccgcgttaccgcattgctcttgtagtagcaattatactcctccaaagagttgtcgttgtataatttgcgcagttcgggtttcagcagggcggtgaaaagcgcataccagcgttcccaaaattgagcgatgttatcggcatagataaagagctttatcgcaacgtctttcgccttgtagaaaaccgattctccgtcatagcttactccgggccgattggttacatcgactttcagattctcgcggacattcggggctttctgaatattccgatccgtgccgtcgaggacatagaccccgaagtgggaaaaatcgacatcatccatctcgtacccgttctgcttgaagcccgccggtgctgttgcatagggagcctgattcagcagcgtattgtactcgttcaggctctcgatgtccgtctcgtcggtcggatagacgggcgggaagtcatcggcgaaattcagcgtgatttttccgagctggattttggcggacaatgcgggattggtcagaagccgcagtttgtaggacttgccgagttcggcgaagtcgaagatatgatacgatccatcggaaagtacctcgaataaatcgctcgcgctcaaaatatcggtaatgcaaaacggaatcgaaaatgttttgctatcaaggaggggggcggatagatcgacctcttcgccgtcatattcgggccattcggtgctgctcaatttcttgaatgacggcatctgtacgagtgccttgtacccgtactgctcgacaaatatgccgtattcgctgaacgcatccagcccgtctatgaacagcttgcccaccataagattttcgcgttgtcctgaacgatgtaattcacctcggaatccttatctttttcgaccttgacgaccgcataccccgatgcgatgacggaggcattcgccccgcacattagaaatagccgatttccggccgtttggctgtatttcagttctgcggtggtgtctcctatcaaaaagatttttcgggcctctgaaagcgaaattttgccgcagtcgatatacacgccgaaacgctccggatgatatttcttgaaacgacgaaaagtggcgaggttggggaaattgtaggttgtcataaattcgacccctcgcggggagaacatcatcccgatcagctcctccaatgtctcattgcccttgaacatatcgcaggctccgagtttctccgccatttcatatcgcccgttattggtgcattgagcttgcgcggcatctttggccgctttccattcaccctgtattttcttgataagtgcttgcattagcttcggagttttaatcctttccggtcgatctcatcgaccatgtttttaacatctttgatacttttatcgaccttgtcgagcttgtcgttggtctcggaggtattcttctcgattccggtcagtttgtcgagtacggcattgcccgtgcggttcagatcgttcatgccctgtacgagggtataggtatgcccctgaatggtcgtcaggcgggcatttctctcgaaagcactatcttgcgactctgatgtgatacccttactcgttccctcgcgctcggcatctcccgtaaaataatttttgagactatcggacagaccttgatagatcgcgttgaactcttctccgacctgattgagttctccggcaaatccattcatcgaaccgatcacggcgtcgatgcctttgaatgtgccgtcatttccgaaccattcttttttgtatctgtcgaaaatgcctccgatgcgttcttccaaatatttctgtacgagcatcctttgcaggacatcggcgacaatatcattgacctttttgcgccatgcctccatcgcatcctctccctgcttggccgcttcgaagaaagcatctccgagttccgaggcaaggtcggcggcggtgtagccgatgatgttttccagcatctcgttgatgatggtagccatctcttcggcgatctcctgaatctgtcgctgccactcctcgatcttgccatggtcggtttttttcttgctctgctcctcattgatctgtttctgaatgagtatctgctgctcggcaagattttcgagctgtttccggctttcgtcgtatttcttccctccgagggctttgtcggcggtgtaggctacctttgcatacgcatcggcgatcttctcgacggatttctcatatacctcgctgtcgtagcgcatccgggcgaacatccgcgtccatgcgttgccgtactgctgcgatgtgaggtgcaggcgcaatacctcctgcgtcgtttcggcatagatgtctctcaatttctttacggcatccccgacgttattctgtaaccggacggcatcggcattgtcgagttcccattgcagttggtcgatgcggcgttgtagattctcgatctctttttgtttctcatcatcgtcgttgaagaggttggcgatagccgtagcgatctgcaaagccgccgaaatgacggcgaggatgaccgatgctttttctacggtcgagatcgacgttgctgcggcctgtgctgtcgattgcatggcggctcccgatgcctcggctgtcgtcgccatagcttcggaaacactcttgcctgtgtctccgattgcgtcaatgacggtcgccgtagcatccaataccgcgtcaatagtatcgagggctttcccgatgcccattgcaacatcatccgagaatacggatgcgagattctgtgctttgccaccgacatccgaaacgatacctccgacattacggagctgggtcgcaaaacttttgtatgagttggtgatgctattccgggcgttcaatgcctgctgttcggcttgcattgaatgcgtagttgcgtctgcaagatttttctttgccagcgataatctttcttcggatttcgcatattcttcgctttcggccgatagctctcctctgtttatttgtccgcggagggcctgctcttcggcaagggcggcattgtattcctgctgtgccgttgtgagagcttcttgcgccgtatgccattcttgcaatgcggtagtgaactccgttttggcgtcgccgatgtcttggattgacttatggagcgcgacaaaaggatttcgggaggcgatttcattttccatttttgaaatagcttcctgaatgtcttttatctcaataaatttcatagagcctttattgctctcgaagtaggctttgaccttgtcgagtgcatactgcaacgatgaaatagactgttctcctaaattcccgaaaacaccatcccagttgatcgaatctttcagattctcgaatttcgcatctttaatcgcattttccagctctttacgcagggacaattttgctccctcggtggttgcatcggttattttgcgattatattcttcggtcagggcaagtaccttttcttggaaagacccgtactgaatgaggtagttgttcatagcctctgctttggcatcggcatcctctttcaatgctttggcagtcgctttcttttgattctctgcattttgctgtcgagctttatttaatgcgtcgaattgttcggtcgtcaatccgttttcattgaccgaaattcccgcctccttattttcgcgtttccaatccgtctcctgtttgtcgagtttatttttctgtgtagtatattcgaggtcgatcatagcgagttttttagccaaaccctctttcatcgcctcaatttcggcagctttggtttcctcctcgattttaacgagttcttcgccgagcttccgtgctttatctgcccgccgttccgcttcttttgcgtctttctcggcctgtttgtcctgcttttgagcatccttgtccgaggcgggttttgtcgcatcataagctttttttgccgcatcgagagcttctttcagttctttcgccttacgttcgtattcttcgtgcgtgagctggttgcccgtttcattgagaaagtcgttgtattctttcagtgctttttcataggccgattttgccgctgcaccccattctgcactcgaatcggtcggcagattccgtttgttctgctctgcgcgtagcttgttgagctgatattgcagttcatcgcgggagaatgaacccgttaaagcggcattcccctgcgtgatttttccgtattttgcctcttggaactgcatttgggcaagcagggtttcccgctgcttgatctgcttttcgatggtttcattgctaacccccgtcagattctcgaaataggcatttacgtcgtttttgcgtatctgttccgaaagagccttgcgtttgttgtaaagattctgtaattcggcttcttcgtcgcgcgaacgagcggatttaaggacatttcgagcacgatgctgaccatagctatcttggtagtattgcgtcgcccatttcgtttttccctccaactcctttattcttgcctctacatctttcagctctgttttcggattggtgatggattcctgcgcttcaagctgggctatctcctccttgatttgcttgatatttttcagcttctcatactcggtgtcgtatttggcgaaaatatcggggtatttcatttcgagtttgttcagggcctccctacgggtgtcggtagcgacagcctcattagaggcgatagaacataactcctcgattttacgcttgtgttcatcctctgcctcgatggttttctgcttttgggcttgatactcttcttctgcttctttcatccgttcggtttcggttttcatggaaagaagcgccgcagtaacaccagccagcagagtagcgatgaggacatagggatttgcaagcatcgttgcgttgagcagcttttgagctttctctacaactacgagccatccgtagtgtatcgcttcggctgcggtcaatgtaccgacgcccattgcttgcaagccttgtgcggccgcgacagccatgcaagctgttcggtaaacgccataagttgcaaccagccccataaggacgcggccgacctgctcatagttttcgatgagcgaagaaactacatccagcgaatcattgataacgccctcggattggttgccaattgtattgaacatcgacgagagggcatcttggatatttgaaatttgccctgtaatagtcttggattgctcctccatgaggttgtagaacattccgccctcgttcgtgaggttctgaatgaccttttgcacctccgggaatccgactttcccctcttcgactaattcccgaaccttattttctgcgacgccgagaatctgcgcgagttctcgaatcatgggaatacctctgccggtaaactgattgaggtcttgcgtgtagagccgcccctgcgtcatggtcgttccatagagatatacgatgtcgccgagaggctgggaaagtcctgcggcgatgttgccgaggcggatcaggtcgtcatttatattttcgacattttcgccgtatgcgagaagccgtcgtgctccatcagcaataccttgcaggtcgaaaggggttttcgctgcggtatctacgagttgatccatcaactgaacggctttctcttcgcttccgagcatggtctcgaatgcgacttcgagctgttgaaactcgcctcggatattgatgatttggcggataagagattgagcggtaaaagccatgccgatacttgcggcggttttcgccacattccccaaagtgccatccaaaacattgcctgcattggtaacatcttcaagggtcgattttgccgtaatgcctgatctgcttacagctttgccgataccgtctattttagcgccgagcttgccctccatcgtagcgattttcgcttcaatttgagagatgccggtttccaatccgcgtaaatctacggatgtgccgaaactcaatgcgccgtcatcatttttcatatccttacaacctcttcgtcatctgtaaaatctgtgaaattttcagggttattcgcatccttgctgtcatcataaagcggtctgctgttttcggccatatcaccgggcatcggcattgctcgactatacatgatggcatttacatagctgatctcatataaggcgtatttttctgttactccgagtgttttagctattccgaggacggttgcccaaatgctgtcgttcagtcttttaccacttccttggtgggtttgaggatatttgcctctgacagggaagtggtaatggcgaaaaaactgcctatctccatatcttgaagtcgttgaactacgacattaaacaaggtagtcgggctgacgttctccaatatgatttttgcgagttctgcctttttatcgaccttgattgtggtctcggtcttacgccggatcaggccgaacaaatagcgtttctcctgtacgatggtgcgatattcgatgaggtttttcgcgccgagaataagtacggcggcaatatcgccgataggtcgataatatcgggcataatgcaataccgaggttacgatctcttcggccggaaccttttttacaacggggagagttgctacgatctccgagatgagaatcagggtcgcagtagatggaggggctatttcgtatgtaaccccttcgatgtcgatgttgtcaatgcttttttcaagaatcgccgatgcgacgctattttcgatagtattctgttgttccatatcccgataaaattgcggagggtggaggattcgaacctccgaagccttacggcttgcctcgttagcggtgaggtgcattcagccactctgccaaccctcctgtttgcggtttctcctgccaaccgcaaagggtgtctctccactcgtcagcatcttacgatgctatttagggtttgggggcggcccaatcttcggccttgacccggaacttcttgtaaagctccccatcggagcaggcgagaatcttgaatgtgagatcgacatacgatccctcctcctcggagctgcccggacggaacgatacgtgtgtgcgccgggccttgatgccgatagcaccgatgttcttgggcgtgagcttcacggagaaatcgtccgatacgacgttggttttcacggtcagctcgttgctgtcctccgaaacgaccgctccggtaaacatcttttccgtatcgaaacccatctccttgacgcgggttgtcagggttacgaccggctcgccctcctcctcggcgaccacgattccgcctgtcgccgttgcggtcagggtttcgccgtcctccgtggcaagcgtcgtcgatttgtcgttgatagtaccgatgtcggtcagggaggctgccatagcttcgtcgtcgccggttttaccgacctcgatcttgcacttcgaccacgacatgatgatcttctttcccatagttttattctgttatgcggttgaacttaattcttgcgtaaatgaagtgttgctctatatcctcgttgcgcatcgtggtcggtgtcgcatcggtcgagagccaatactccgtacctcctgcggtttctacgaatgagagaatcaactcctgcaattcgccgatacgtttcctatccggaaccattcgtccgtcggtgtagggtatatcggggacatagaggttgaagatcaccacgcccgtttgtacttgttcatcaagtcctgcgaggaacttgacgatcaaatcctccgttgtggcgtcggtcgggcgcatttcgggtcggtaaacctttcctctgatggcctttccgaggtcgctattcttgacgaaagaatagaaatcccgctcaatctgcgtctccgtttttatcatctctctattcgattaaatcgttgagtagtttcttggcaagggattcggctttcaactcggctgatgtgagtacatccttatggtggactgcttcgacgtatgcggcgtatttcatgcctgcgcagacgatcagcaccacaccccacggaaattttgcttgcagtttttggagcaacgcttcggcagcgggcgggcctgcttctccatgcccgttcttgccgttgtattgcttcgaggctcccgtcacgacgggtttcccgtccacaagcaccacatagcctattgatgacctcaaattgccggtaatatcgttgtagctgccactctcgcgggcgattcgtatgcactcctccccgatgaaagagagttgcttcacgagcagggcgacgatgtctttcatcttggcctgcaatccggctttcagcttgcgcatatccgttttgctgacgatgacgcccttatatttgccgtgagtagtaacgactttcgccatatcacactacgatttgagttctgcctacggtggtgagaggttccgcattcatcacgcggtattctccgagattttcgcccatcctttcgagtttcacccgattgtaggggaaagggatgcactcaacgaggatcgtaaacgaagcctgccgaaattcgccgtcttcgtaacgccctttgcggttatcgctgttggtcttgatcgaacagggcaaaggatcgctccaatcggaacgggcctctatcggttcgccccattcgtcgatacctccctcggtgagtatctcgtagcgtaatgtgccgttgtacctcatatcaccatagatgcgtgccgtcctcgatcacgcgcatatagtcggaaagaacctcatccgcatcgaggccataatgtccgcaccaaatcgaaaggctctgtttgagggcttcttcgctcattacggaggtcgatacgccgttttcggagcggctgttttcgacatatccgatgacaaggcgggcggcaacccgaaagatcatagggtctttcggggtcgcctcggcctttgcgtcgatgccctcattgaagagcgcaaattcgatggtcgcgttatcaggatagaatgtgtttgctatcgcattgcacaaactcctcgttgcggtaaggttatccacggctacgactgcgttttgagggtgtagatgccgttcatttccgtaatcacgggcaacgagagtgattcggccttggtgaactcaacgccgttgctgccctgcgtttcgcccacgccccattgcgagacgcggatacgcccgtagttggagtacgctactccggcctcctgtttcagctcgttgttcgcccatgcgtttttgacgatgccgagcttgccgtcgggaatgaagaccatgttcttctcgttccacggcgtataggggacgcggagcgtgcctttctgaatgcgaacctgacggcggataggctcgaaaacaggatagctgttttcttgcatataggcgttcaggtctttcagctgcacgatcttcgcagatttgtcggttccccagatcatctgcttgatcttcttgctgcggcacatgtaggagatgcgcgacggagcgcagaggattttgccgaatacggttttgtcctgtgcggcgtcgatgatcccctgaatatcctcgaagcagtccaccgtgtcgatgttggcgtctttccactcgatgcgggacgacgcgatgttttcggagggctggttgaagttgatcgtgccgcgcacgccaccttcggggttgatgttgtcgtcgagttcgacgacgccctcgttggaaagcggacgcaggaacaggatgtcgagctttgcgaggacggagcttacgaccgtcgtcgagcttccccacatcagtttgatgagctgctccgtctttgccttgtcggggagcgacttgctgtcgaggatttgcagaaccttacgatagtcctgaatcgtcatcggcagcgttacggcatgattgaggatgcgctctttcacggtttccaacccctccgtaccgaggatagcctctttcgactgatcgccgatggtcggagcagcaacagtgatgttgtactgaccgatgatctcctcgaagtcgaggccgatagtcggggtgtcccagtcgaggaaacgctcgaagattacgttgtcgaaaagctgcttgtgcagtttcgaggcggcatcgaagcgagcttgtacgtgctgcgtcaatgcgccaaagattgagctataaagaatttcgggcatgatcgttactgtttaatgaacagaatgttcgggtttgctttgaggcataccttgccgggattgatgagccagtcttccagcaaagggaagttcaggctcggatagaggactaccgcctcgtatgcggcatcaatcgtcgggaggccctttccggtgaactccttggccgctccgacaaccatgttgggtgtatagcgaggcgcggcagggatggggtcggaacccgaacctccgcctgtttcggcatattcggttgcctctacgaggatgtcgccctcggccagccctgcgatggcggatgcgaacgtgatgacatcgtacccggcattggccgtgtcgatggacttgatgatcggggatttgtcggttactccgagtttcattactacgtcgcctgcgacgaagtaatgccctttggcgacgcggggcgcggtggtcgtgcctcctttgagaaccttggcggtcttgcaaacggcggcactcatcgcctcgaaatcgacatagataggagttccccgatgcaacaccgttccgacggggaagttctgcaccggcttgaagccgcccggcagaatcttgcactctccgcgccaaatttcgggcgtgtggcccgatagctgcgttttcttgaaatcaatagccattgttgcaatcaatttaaggggtgaatgattcggagctgttacttgttgggaagactttcggcccaagccttggcgtcggcttccattgcctccttgctacttcctgtttcatgcgcctgctccttgggcatgaggttgttggtgactaactcctgcttgtaatccgccagctccttgtcgaggtctgcatcctctgcgaatgagactcgcttcatcaggtagtcggggattccgagctttttagcctttgccgagatttcggcctgtcgcgtggtctttgccttttccgctttgagcgcggcgttctcggtttcgagatcggtcaatttcttttggaaaggcttgaaccattcgggggcctcatcttcatttccgccctcatcttcgccctcgtcgttggattgcggtttctttgattgcggtttcggacgttgcgtcttcctcgtgatctccccctgcattgcctttgcatagggcacgagcgaatccactttcgcggcgatgtcttcgtccgaggcatcgtcggcaagaccctccgccccgatctctacgaggtcgtcgagtgccttgtcagtcagtcccatatccttgcatttttcggataagagcttgcgaaatttctttttcatagtcgaaaaaaaattgttaaaacgtatcgttacggacaaaggtaatgaaaaatatctattaggtatctaaaatttcgacaaaaattatctgcgtggttatgacatagttatccgtaaatccacgtttttgactgattttgagcgcactttttctgcgaaaaaagttgcttactataatagttggatatatatttgcatcatcaaacagatacttaataagtaataaataacgaccaaaatttataataggctatgacacgagaagagtttaccgaaagagttggcttgaatgtatcggacggaatttttgaggtatggaacggggtgtatatgtcctcggataaggacaaggacgagttctgcaaaccattcgccaccaagaaagggcatctcgatctttcccggtcaatggtgatcgaaatcgccgaattgaagaaaaagatcagagtgcaaaaagagagctatgatcggcaggtagaactcgcaacgtcctatcaggataagtattacgcggaaaaggccaagcacgatgagttttacaagaaatatgcggaagagtgcgaaaagcgatacgctctcgaaagaaagctcgaacagataatgaacctaatcaacgcataatcatggataaaacgagacaggccaaggcggaaagtctgcatgaatggaagtcccaaatggcggacttcctcctcgaaagagcgcagaaattcggcgacattaccctccatatcaaagcggccgatttgattggcatgaaagaggtgatccgtcggaaaatcatcaagggcctgcccttgtgggaggtcgatagggtttggttgaaaaataatctcaaataatcgcaagtatggaaaagatcaaaatcaagcatgtaggattcgattcatgggatcgggaggtattccaaacgcagaaagggacgtatgtcgtggatataagtttggactattcgcatcagaatatgaggctctgcacgaagaacaacaacgagttcgacggggaaccggatacggccctcaaaaccgacgcattcgagatcgtcgatgatttcgaggccgagcaataatcgcaaaccttaaaaattcaacgcaacaatggcaaattcaatcaatgtaaacggatgctccgtctgccagccgggacgagagaactacacgagtttcacggccaaaatcggccggaaatcggtcaaaagatggcaatacgactaccgcacggagagcggcgagcttttctcctacgtcggggcatccctcgatagctgccgtgcaaagcgggatttatggctctctcaaaagcagtaagtcatggcagcgaaaaaggctacaaagacctacgaggttgaggtttctatgacgtggtcgcagtcctatacggtcaaggccaagacggcggccgaagcacggcgcaaagcatgggagaaattcaaacggcgccctccgaaatcctgctttacgctcatggaggacagaatcgacgaataataatcaacgcaacagatatggaagagaaagatattaagacggtcaagaccacgcggggcgaactccgatactatcgggattggggtaattacgacgggggtgttgtaatgctgaacgcccaaactatcgaccgctacaaggcgatcaagaatgagcatcccgacgcggataaatgtggggttttcttcgcttttagcagagaacagttcgccgagggatacaagcatttggtagaactcggacacatcaaagacggcgataaaatatgccaagataaggacacgggagctttcggtacaaaggacggacttgcggcattcttcaagttctacgatgatagccgggcggctatcccgaaagaatgcgatccgcaggaggtttatttctacgaatacaataaccacgagtgcatgatcgcatgggatggtgataaagaagcctatgaccttatcgttgggtattggggtgaggaagtagcaaagactattgaacgattataaattaaaattcaacgcattatggaaacgacattgaacaacaaatttttcgacttcgagaaagcaaaggtgcagaccctctccctcgatcaactggcgcgaacccacaaggagaacgacatctacggcaagccgctacggggcatttaccactatgatttgctgaatcagattatcggcatgtgcaacgcgcagaattatgatgtcgaggtttacgacctctttgcagcgcagaataaagaccgcaatactccgggtgtcgtcctcttgccgcaggtagaggcccaatacggagagcgggccgtcgaagcgcatatcctccgtcgggtattcgccaacattcgcatcacgaatttcgatgatgcagatcatacgaccaatcttgccgtcgcatttcatcagaaaggaatacaggtcggattcggcaatatggtgatgatctgccacaaccaatgtatgctctgcgcggatcaatatatctcgacctattcgtagaaaggacagggacggggcaatggcgtaacgattcccgaaatcctcgacatcgtgaagtcatggatcgtcgatgcccgccgaatcgtcgttaccgagcgggagaagatcgagcggatgaagcaaatccctatcgacgcgcagcagatgtttacgttgatcgggatgctgaccgccctccgcgttaaatgcgatactcatatcgcagaaatcagggagaaccgcacctatccgctcaatcagtcgcaaatctcgcggcttaccgaggatatgatgtatcgctactatcagaacggcaaggtcacggtatgggatttatacaacggcgcaacggagttgtataaagccgatacgatggatattccggcccttttgccgcagaacagggcgatggtcgggttcttgtcggagcaattcggaatttagccatgtatctcgatgcaacgtgcgagggtctcccgtcttcaaaatgggaggcccttatgaaaggtgcaaggagggtcagttataggatgctggtatcgcgcgtcaaaagcgaaattccggagttgtatcgtgcgttggctttgaacctatacaatccgtgggcggatcaatgcaggcagaccgctacgcattttatcctcgtgcattcggcgatagagtattttatccacaaatagggtgcaacgatgtttgatgcgggtattgtcctgaatatcggtcttatatatcgacgaggtgcaatgggtacagcaacgacccctgcaacgacccctgcacagaagataagaatatatagatatattaaaaagatagaggggaagttttttcgatgcaaaattataggatcaaccatcgggcaagaccttcgtaaattcatcctttgaaaaagaaaaaagttccgcgaaaaaagaaaaatgaaaatgccgccaattttcgaatatctgcggtcgggccgatagattggtcgattcttgcgcgaaagcgtggcagaacgccggaaaagcggtaaatttgcacaagtattggattatggaagcaaagaagatagtgcatttgcagttcaaggagccgtacaacggcgaaaccgacttctacttcggttccctgaaagcgatctacgataccgttcctatcggggcggtcggcatcacatacaagtccctcacgaatgcgacgaggggcagaagcgaatacgagaacaagaaagtcctcatccgcatcgggcaaatccagcgcaagacgagaggacggtcattaaaatcggagtgcgatggatagcaaggtatatcggctgacctatgttgcggattcatacgatctcattacgcatctgtattttgtcaatagggcgaaagcggaggctatgtatcgtgaaaagctggaaaaggtttcattttaccgaaatggctatatctacctgcattcgatgaaagagaacgccgacggggtgctggatatagacgaagtgatagattctaaaaatttttgatatgataggtgcgataattggcgacatagtaggctctcgattcgagttcaataatgcgaaaggcggaaactttgcattattcaccaaacaatgcgattttaccgacgacacgatctgcacggtggcggtagccgatgcgatactcaaaggggaggactacaaatcgagtattttgcgttggtgtagaaaatatcctaatccgatgggggcatacggcggttcttttgctcgttggattacttctcccgacccccagccgtataacagcttcggcaatggcgcagcgatgcgtgtaagccctgttgcgtgggcttttcgctcggagcgggatgttattcggcaggctatcgaaaccgcaaaaatttcgcacgaccatacggagggaattatcggagcgatggtaacggctcttgtgatctattatctaaaaaatcaattttgggataatacgatggagatatgcgaaagcgtgatgtgtcagtattacggcgaggattgggaaagccatctcccgccttgcggcaaattcgacgagacctgtcagggatgcgtcccgctggcctttcatatcgtcaaagagagccgatctttcgaggatgcaatccgcaaggccattctctacggcggcgacagcgatacgctcggagctattgtcggctcacttgccgaggcttatttcgtggttgatcctgcaatgattcagaccgcgatgggctatttgccggaagatatgcagaacgtcattcggaaatttaatgcaatctaccgatgaaagaatctgatttattgcaatattgccgctattataaaggcgagcggaagaacccatacgagggtaaggaacaaaacaaggcaatgctttggatgtacgagcgggcatggattcacgatactatggcggtcatcgcaagaggcgatgcgaatgtctctgaaagtcgaaatctcgatgaatatgtcgcggtcggattatcggattttgagaatgccgatggagtgccgattactttgaaatcgctccttttcaatcggtatgcacaaggcaatatgtcctcgttggcagattgcgtcgaaccgttcaagaaattttataagcagtattacggttaagggagcgcaataaacgctccctttatcattgcaactgtccgatcatctgcaaatagatcgtctttccttgttttttgaggactttgaattgacagcctcgttgcccgatccattccatttcggagttgatcttttcgacagattttccgtcccatatcacgccatcgtcataatcgaatttgtgataatccgtgtagtgggaaaaaggctccgcatatacgcctttggcccctttggggactacgataaccaagttgtacgattcggagaaacctttatgccgatgcacggcggtagataggaatcctttatcgacaaaaacatcgccttttttcaggtttccgaggtcgtatccgagagaatcaatcgtgaaattgcttacgcctcgtcttacaaccgtattttgaggcatggcgaatttttcaatcgctctcgtcaatatcggcagatcgtgctcgaactcttcgcgggcacgcgctccataatacgatataccgcgcagaggctcatttagatagctgtaagtctgcgtatatttcgtcaatatgatccgctcctcctttgtcagcgtcgcccaaatccgttccgtgtattgacgcagccggttatctgcatcatcgaccatctctgattcgtacaaggcgagaagcctatctatttcctccttgctgatactcggcagggtagaggctttcatcgttgcgcctttcttcgcatcgcgccgagcctgttccgccaatcgtttttgatattctgcgacggcgagtgaggttttggacttgataatcgacaattcggcattgctattgactgcctgctctgcatcggagaggagttttgcaacattgaggctcttcggatgttctgccgaccattgtttaacggcgtcgagttcttcggttacctgcttgatcgctatcttgtaattgactgcatccaattttttgatgtacgcctcctgcgataccttccatgtcgcatacttctgttgaacacctttcatattgccgccgaggaagtcataagcctcgaaatgcagctttttcgcctgctgttcgagggatagacccgaccaaccctcgatcttcgatttgacggcatcatataccccttgcagttctgccatcgtgaattgctgatgccacgagtgaacattggggataatgtcggcgagagcctgctccgctttcttggcggcgaggatggcctgcgcgactttcttggtctcggtctgcatggccgacagatcgcctgcgtcgatgtacttttgcagggtggagtaatcgacttcgccataatccccggcgactttggcgatgttgttcgccgccgtcttgatttgctggtgcttcttctgccgttcggcccacgcattacggattgccgcctcctgttcgggcgttcgggcctcatggcgtaatgccgccttttctgcgattgtaagctctttcggtttcggattgagtatctcatcaatcgccgcagagttattgcgaataaagtagggttccgtgcctctactgcgggatgcaaggatattctccttattgtctcgcacccaatgcttgaaatttgccggatattcggtgatctgcttgcctcgcggggtgtatttctcgcctttgaggaatgccgccgtaactttcgccatctcctcctcgtccatcaaaataggcgttgcaaagcagaaacattgggcatgccatccgtcgaatacgaaatcctttgggtagtcgccttgaagtttatcgcaaatatccggtcgggggtggttcttcgatagctggatgcgctgaccgaggacgaaatccatctgctgccaccgctcattgtcggcgcggcggtaggcgatgtttgtctctgacctcgcaacgcgcatggcattcttggccgaggatttgtaaacgcccgatccggttttgtagtcgctacggtcgtagtcgatccatcggtatttgcccgttttctcgtccttgatgcgctttttccacttccgcccgtagataggcttgccctgctcgtcttcgcctttcttgaagcggaaacggcggaacatcaggtcggggtcgttcaggtattgccggactttgcgggatatggattgcgccgaatctccctcgccgatggcgacggtcatggcgatctccatttcatcgcggagctgctgaaccgactgccatatccgttttgagagattgaggccgttctccgttcggttggcgaaagcattcatcgccgccatattgcggttgttccatgcgctgaactccggactggataatacctctttcccaaaacatgaggaaatgagtttatcgcatgcgtcgttggccttttcccattcgagcgtgatcccctttttgatagctgtcgtagtcgtcgaatgcagttgccggagcaatgcctcgactttcttttggattcgcatattatccccgtcgaaagagtacatgaccccctcgtccagcgtcggcacggatttattgagagcgaggatttcattcaccgttgcggcgaatagctgcctcactttctcggcgtaagcctctgtgcgctgaatgcgcttgatggtttccgctttcgggtcgggagaatatgctttttttgccatctgctacctacttcttctgttgctgctttttcttcgggtcatcttcatctccgttttcatcatcgtcggggtcgtcgccgtccgatgcggattgcgggcctgcaccctcgatgtcaccgaatatctgttgctgcttttgcgcccgctcctcctcttcggctttcagacgctccatttcgagcttcttgtccttgacgagcgggttcagttctacgccggtttcggtcgccatgatgccaccgtcgaggctcttgatgatattttcgagggcttccgcgatgtcgtccccgaacggctcttggaactcatgcccgattttcagattctcgcactcggttttcagatgcacatcgaggacgttgccgatgatggccgtgatgagcgaagaggtgcgggataacagctcgtcgtgggtttccttgtgcttggccgccttgatgtcggcaagcaacatcaccgtccgcagggcctttcccgatagattgctcaacgattttagcgtgtcgagcgaaatattcggggtgaacgacttggaaaggatatgattctgcaaccattcgatttcctgtttcttgctttccggcgcactatcccatgtcaggtacttcgctgccttatccacgccctcggaatcgttcgtcacgagcagtttcgccgcctctttcttctccggcaggttcttgataaggtcggcggccatgatggcgataggatcggcgaaatagtcgtttgtatcagcggtgcgtgagccgatcagctcctcacgatggatgagcgtttcgacgccattccattccttgtcctgctggaagaggatgagcggaatcttgccgatgaaattcacctcctcgacgacctcccatccgatgctcttccgcgtgcatcggtagatgatattcggggtatagatgtcgaagtgatagacgaggctgttttcctgttcccgcacatagtagccccaagctatggagatcaggttttcgtactgatcccatcgcgtgtaaatctcatcacccttgcttttggcaagcactcgaatctgaacgtccggcgcatcgttcgcatcgcggaaaacacggaacagcatcgcgctttcggtctccgatccggcgatgcgtttgcattggcggagtttgctgttgaagtgagtgcgctcgataacatcctgaaatttttggaacgcccgatctgtccctgtggattgctgcgtccatttcaccggacggccgtagaggaatacgagtgcgatttcattgatgtaaacctgataaggtatcggcagcttccataccggttcgagccggatgaaattcccctttttgtcggtaatgatcttgtcctcccgcttcatgatttcatgggaggttacttcatactctttgagcgcggcaatcgccatatccatacggttgcccatgcgctccttgaccgccgaaatatctttggcggccaacagcttctcaaactcctgatttcgtcctacaagagcattgagataattgcgaaacaaatcaaatagcatcatatccttaaatttttggtttacatccctaaactcgacttgctcaatatgtcgtaatctatatcatcatcctcgtcatacaggtcgttgatcgcatatccgagaatatcgacgaactcgtcgtgcggctggctcggaaatccgcatacttcatcgagaaaatcgtcgttccatgatccctcgacgatgaacacccgcccgcactccacacgcggcgaaacggcccgcaatcgtacctccttgtcatcggtcggcgtgggtgtccgcttgacattgagggtcgaaatttcttgaagcatctgtaccacgctctcgccgttggctttcggctcgacatggagcttgctctcggaattgccgtcatgcgccgcgatgtattgaggcagaaaccgcaataggtcgggcatctccttatacactttctgcgcgtcgatcagatagatgtaattcctgatacggcaggctgccagtacgccgctggggtcgttatcttggccctttttcttcttgttataggccgtatcgaggtagaagtgtatcggctcgttgaaccgcagcgaccggaactctgccagcgagatcgtgcggaaccaatcccttttcacgatattgccgccctcgatggtcgggtgctgctgatacagggcattgaactcgcgcggggcacgggctttctgcttctgcaacttctcgatggagtggcgcgacggccacaatgcgtcgccgatatgccgttcgctcaatccgctgtcgtattcctgttcgcagatcgcagggatggcgagtaccgtccactcctgcggctcggctttgaggatgcgtccggcgaggtcgtcctcatgccatcgcgtcatgatgaagagctgccgcgaattattgtgcagacgggtcgaaaggacggtgttgtaccaatcccacacccgctgtcggtaagtgatggagtttgcctcgtttgcatcctttaccgggtcgtcgatgatcgcaatatcgacgggtgtacctgtcaaagaacctcctacgccgaccgctttgtaaaaaccacgatggccgaccatttcgaaaaggtcaatatttctcaaatagccccgtgcatccatacgggtattcgagccattgaggtaggtagcgggaaatattgcctgatactccttgctgtctatcgtcctctgaattgagcgcgaaaattgttgcgcgaggtcggaggagtaggaacagccgacaattttcaggtcggggttttgtccgagtgcccatgcgggaaaattacgggagatgatttccgattttccgtgctgcgggggcatgaaaaccatcaggttcttgatcttgccctccaacagcatttggcaatgatccgcgatgagcttatggaaccactccaactcatatttcggattgctataaccgaggaaacgcgaaaaggaggtcggagcttcgagtttcaacttctcgcgcttcaacctcatcaactgttcgcgtacctcgattgtagatgatctcattatttatccgccttatcctcaaacttttcaagtcgtgcgatttctgcattgatttcatcgagtgtcatcggtttttcgtcgtcctttttgagcattatatcgttgcgctgcctgttctgatagtgttcgggatcgagattcgtcaggaggaaaatcgcggctccgatattcggttgcacatggattttcttcctcttcatcttgaacggagtcggctgtccgtccgctccgacgcggaactcctgctcggtttcctcatgctcataccctttggcggctttggatagcgagatggcgagatcgtgggtgaggttctgtttgaaaacctcctttgcccgctcgatgacctctttgaactgcggtttgcctttcatccataggcggtaggtcttttcgtcgatccccatctcgcggacaaactctttcagcttcgctccgccgtagtcgatcaggccgtgagcggctacccatgcctcgcactcctcgattttggccgcattgtatttagccattgctgttcaggtctatgagtttgtaaaattccttgcgtagatcggagtttaagttgaagacgcccgtaaaatgcgctacggacatcttgccgtcattccgcactcctcgcatcgtcttgcacaggtgttgccctttcatcacgatagcgaagccgagagcctcgttattcagagcctcggaaagcatctgcacaatgtcccgcgccagccgctcctgcaactgcaagcgggcggcgcaatagccgaccacgcgggcgactttgctgatgccgaggatacgccctttcgggctgggaatgtaggcgaagtaataccggccgaagaacggcaggatatgatgctcgcacatcgaatagtagtcgccgcagtcgaacacaatatccgacatgccctcctcattggcgaatgtggtgatcttcggcttctgcgccggatcgtagcctcggaatatctctttccacatccgcataatgcggtcgggagtaccgatcaggccctcgcggtcggggtcttcgccgatggcgcggatgagcgttttcagcgcaccgataatatcttctgcgtttggagtgatagcttccatttcgggtgtgatttgatgtagttgatagttgccgcgaggttttccgcgttccgtgcctcgtccttgaaatcgcagggctgcaagtagtactctttggcctcgatgccgtcgtatgccgtcatatcctgaccttgatatacgactttcagctcgtcgatgcgttggagccgaagctcggcatgagggcaaaagtcgaatttcggcgagcaggtgatccaatcgacggggagatagcatttgatcgggatcgtgccgttggtttccacctgtacgaacttgcccgctccgttgcgtagtcgatggatcagcgattgcgtgatctgcaacatcggttctcctcctgtaatcacgatgtgcgaggccggaaaatcggcgatttgccgcatgatctcctcttcggtgaggtcttggtagggctggtgctccgtatcgcagaaattgcagcggagattgcatcctgcaaggcgaatgaagattgccggagtgccggtatagcggccctcgccttgaatcgagtagaaaatttcgtttaccctcataatgcgccctcctcgtctttgttggtgtccgcgacatagattgcgacgttgccctcgctttcctgcaccgtcgccttgtagcattcgggaatctgctcgacgatccatcgggcaatgttctcggccgtcggattgaacggcagcagcttgttgaagttgccgtgatcgagatagccgtgaatcttgtccttgatccgcttgaaatcgcagaccattccgtcggcattcagtttttttgctttgcagaataccgttacgacccagttgtggccgtgcaactgctggcattggcttttgtaggagagggtcagccgatggcttcccgcgatctccattcgtttggaaacgtaatacattgctattcttcttgatgtttgcgagttaagaggtagaaaaacggcgtgtcgcatagagccaaccccgctttgagcaggtattgcccgatgaccatgccgaggacgagcatcatgccgccctcctgcatgaaccatccgagaccgatgccgaatgcgattgagatataaatcgccgtgtcgatgatctgcgaggtcagggtcgatgcgttgttccatatccaccgccgtttgggattgccgcagaaccgtcctcgtatcttgtggaatatccatacatcccagctttgggagcatagataggcgaccagcgacccgaatacgaataccggcgtctgaccgagcagcatccggtaggcccgttgcatttcctcgtcataggcggggagatacatcgtcaggataatcaggacgagggcgacaagttgggctacaaagcccctgataacggccttgttcgcctcttttttgccccatatctcgccgatgacatccgtacataggaaagtcatggcataggtcaaagccgcgcccggaatgagaatcggaaccccgccgatatggatgccggtatcgagaaccttgctcgtaacgacgttcgccacgatcaggcacacgacaaacacgacattcagcgtgatgagattggcgtcattccgtttcatactccgtcgtatcttcgattccggcatctcggagggcttccttgcgctcgacgcatgtcccgcacttgccgcaatgcttttcgccgcccttgtagcaggagtaggtcgtggagtagtcgagaccgagccgtttgccgatgcgggcgatgtcggatttgctgatgcctgtatagggcgcgtcgatctgtaccccgatgtaggtgccgtgccgcatggcctccgacatggaatgcacgaatcccgcgcggcaatcgggatagatcgcatggtcgccgccgtgattggcgatgagtaccttgctcaactttctgctttcggcaagcccgcaggccacagaaagcatgatgccattgcggaacggcacgacggtcgatttcatgttttcggcctcataatggccctccggcacggcgtccgcgccctccaaaagcgaggatttgaaatactgaccgatgaatgcaagcgggatgatgatgtgttcgatgccgagctgctggcaatgccgcgcggcgcactcggcctcgcgcttgttgtggttgctcccatagtcgaacgttacggccaatgcgatttcctcggccttttcatgcaggagggtgatgctatccatgcctcccgatacgatgatgacagaatctttcatatccttgttgctttttaagtaagaatcggaattacaggaatttttcggcgtatcggctgaacttgacccactcgttgaagttgtttaccgcgccctctctcgatttgagcctgcatccctctttgctcatctgctccatcaatccggtgcgcgggttgaacttgcagatgtagccgccgcgattgccgtagagccatgcggtgctatcgaccgaatcgaaccgatacttttgcaggttggcgacggtggtgtatcccagcccgtgaatcttcgccttgtgcttgtgggcggtgttgatgaaccacggaaacgccgtctcatagactttgcggggaatttctttcgttacgatgcctccgatggcgacataggggtattcctcgcacatcttgacgaaatactccttgcctcggttcttgtgccatacggggatgggcttcttgcccgtcatcctttcgagcttgtgccgcaaccgctcgacctccgccagcccgacgacgctgtcaatatccaactcgaaaaagagttttacgtcgaagcggttgatgaagtcggcatactccgatacataggcatcccaatcacagccgcccttgtgggaaccggccatgaacgtataagccccgctatcgagcaggaatgacccgaaatgcctgacgagaggcatgaaatcctcgttcttccgcaggtagtagtagctttcgaggacattgatacctgatagggtgctatccccgtccccgacgaagaagtccgctccgtagatggattcccgcattattttgtccttgtcgcccgcgagaaagctgttcatcgcttcgatgacttctttgcggctgttgggcgatgcacagtaaactttcataaccttttgccaaaattcgcggaggttgcctgaaattcctccggcaagaaatatcctcatagcatccttgttaatctctttaagaggtattctattcaaatactctgaaatacaggtcgttaaatacccccccccgaattttccgagacgttcgccgatccagctctcatacaagcggatcaggattatgcccggatagggattgttgcctgcgagatggattttcatcacttgatcttgatgccctcgaactcgcccatgagcgttgcctcgatacgggatttgatctcctccttttggtcggcatactcatcgggaatcgagacggtgatcttctcgcccttgtctttctcggcctccttgtcaagcttgtcgaaaaagctatctacgtcgatctcgctttcattcatcggcagatcgaggccccatgcggccaaagcatcggcgtcccattcgttcgccagcatcgaccactcccaccgaccgaagccggagttatcgagaatcgtgtaggctttcagcttttcaatgggggtttctttcgggatgatgacgcacggggcatccttgtagccgaggtcgagcatggctcgatagcgcatattgccgccgatgatgatatacttgccgttgtcgagcggatataccagcagcatacggtatttcatcagttcggggtatgcctgaatatcctttttcagaaggtcgagcttcgtctccaatatctcgcggggattcgcggggaggccgtcgagctgaccctcgttcagctccaaccgatccaattccagcgagacgaagtcggcgtcgatggctttcagaggcttgttctctttactcataactgttcatttttaagatagataccacaaaggtataaaaatagtacctaataggtagctattaaggcaaaaaaataaagtttacttcaaataagcgtcgatttcggccatgaactcgtcaaaagagcggcagatgacatacttgtatccggcccattccgcccgctcctgccatgccttttgcgatggttgctgtcggcccgtcggggtcttcatctcaatacataagccgtgaaaccgctttgccgggaacaggagcaggaggtcggcgacgcctttcatcgttccctcggctttcatgatcgccgcctcggatcgaagccgtgccccgccgttcgggacggcgaagaggagcaaggcgagctgcgggtatttcattcggaaccaacggacgcaggtctgctggatgatgctttcctgatgcctcatatcaataccgaaaatccgtgaaatggatgatgacgccgtgaaaaactttatcccctttcgggtgtcggccgaagaaccactctttgaagtcggttgtattcagtccgtcgtttttggcgatttcatagcagtccgcgtcgatccattcccgaccgtcgatgcgggcggtgatcgtatcgttttcgctatgataatgcagctctatccgctggatgccgataggctggtcgaggtgggcaatttctacctgcggcgagttgtacgggcgtcccgaccattggcggatcgagaggcaatagccgccccgttgcatcttctccgcgatggcgttccattggtcgaaattgcctcggatggtatgcaacttacagcctgatgcgagcttttccttgaagccagtcggctggcctttccggctatgcgtcgtcgggaacacccgcgacaaggtgatgacgattttcttcttttccatttttcgtggtgtcgtttgttccaaatggaggaaattcgggcatgtttcggtatccatatcgaagcatgccataataaacggagcgggcggcaatttacgccgctcccatgcgcggaagagatgatacctccggcattggtcgctcaacaggcagcaatagccgctgcaatgagctatgtctttattgtaggttgtttccatgattcaaaacttattgctatttcgcgcggaaatgcgggtattttacattatctactgtcggccttaatggtaattgcgtcgcatcggattcgagcgtattcgctgccaaaacgacctcttcggataacctttgcagggacggcgggtttcgatataaccccatccgcattgtgggcgttgatatacccatgagatcagggaatttatgacccgctccaaatccatgaatacctctgccagccctaccatgatgcgccctcctcaaatatgttccgttgttcgggttgcttggtcgccggagtgccgagcgcgtcatgcacccgcgcaatctcggcatcgacttcccgctcgaccgccttactctgattgagcgcggttttcgaccgagtgcggaaatactccttttgcagcttccgcatgagagctactttgtcgaagaattgccgcgcgttcatttctcggcgattttataggcatcgacaatcggggtcttgacgatggaggcgacctcataatccgatactgtacctctcataccctcggcgaggttcttggcggcttgattcaggtcggatgcctgtacgaggatatagatcgctttcttgcgctctgcgcccgtattttcgtcgagcgtgatgaggttgatcttggccttgtagaagtgatcgccgttctcatcccaaaagatttccgagatgttgctgcgcttcacggccgataccgagaatgctcccgacgtatagggcatcatctcgttggtgatgcgggcctctgcctccgtgaatgaaagggcatcgaccaaatacggctccgtgatggttttcagagaaccgttctctctcgtcttttcataacgaacttttgttgtaaaccacatgatgatagatgttttgagttagaatttcggggtgtctttggttatgcggcgcaaagcgcggatcgcattgtctatcgtctgaccgacgacaaagggatgcggcggcctcccgttcccgccgcgcctccatttttggtaatgatgtagtgctcgtagggtttccacgtccgacatatgatcctctttgaatttgcagaggtcgtcgcatcggtattgattcagagtgatgatgcaatgtccgtagccgtttgcatcttcattcttgaaaaaggcgcattcgccgcatttgcagggtctcgtcatgttttattcgttttgtgagttattcattatcttcatcttcaatttctcccgtaggctctcggatgaatccgatttgccggatttcggggccgctgacatcttcaaagattacgacggcaatatctccgtcagtcttgcatccaaccagccgacatccggacgggatgcagacctgaatctcataggtgcgtttcattcgatttctcgttttttaagaaacacatccatatcgttttgccgcctttgccggacgtatgcccgaataggggcttttgtccgatgatctcgatgatccgcgcggtgggtatctgctgctcattccatttgaagatgagcgttccgttcggtttgagaacacgcatacattcttcgaatccttgccggatgtcatcctcccatgaggggaggaggcgaccgtattttttcgccagccatgacgattcgccgaggttattcagatgcggaggatcgaacaggacgagatagaacgaattatcgggaaacggcatcttgcggaagtccccgacgacatcgggcctgatctccaatctgcgcccatcgcaaagggtatgttcctcgctgcggcagtccatgaagaccgtatcggggttgtctttgtcgaaccagcacatccgactgccgcagcaagcatccaaaatctttttcatacgaatagcgattttgaaattcttggtaatacctttactcttgcctcggcacagaaatcctttttgatctcgaatccgtatgcttttcggcccatattggcagccgcgagcagggttgttccgcttcctgcgcacgggtcgatgactacatcccctttgtcggtgaatatctcgatcaggcgttccagcaggggaacgggtttctgcgtcgggtggatcttcggcgtatctgtatcgcgtacccaatcgaagcagttgaatatcatcctcccgtcattgttgaatttcggtaggcggtcgcggtagagaatcaatccgtattcgcagttgccgacgactttcatgttggctttgagtacctgcgcggagaaatccttgcggaatacgagcgggatgtagcgtttcagtccatatcgttgtccgagttcgatataatagtgcatctgctcgaaaggacagaaaaggatcatacaggccgcgcctcctttcgatcttccccccccctcggatttctcctctttgataggcttgtccttacgaagcatttgactacaaaagtgcatgaactccgcaggccggaaatccttgtcggtgtcgaaaaactgcttgcctgcgagtgcgctctcgccgttcttattgtcgccatcaacataccatgccggattgctggcataggcattcgcaccgaggttatacggcacatcggcgatgataagctgcgctttggggatgccgtatgccttgaaattttgaaaatgatcgttgaataattctatgtctttcatagtgtatttccgttaattggtagccattggtagaggctcggtttgcgctctaaatcgccgcgccattcggcggcattatcgtagtcgatgagttcgatgctcccatcccgtttgtccctgacaagacgcggcagattgcgaaatatctcatctatggcgtcatcggtggcaaatccccatttcgggtcggcctgaatgtcgcgccattgcgtcagagaagaaagccgatatttcaggtcggcaacctcttcgacttgcttatccaatgcccgctcgtatgcggcagcggtctgcggggcaatatctttcgccttgccgatgttgcgccaatagcggcgaatccaattccacattgcatagtagaacttatcccgcatatcccgccggagcaaatcggcctgcgtgtcgtacttggccttgtggaggcatggagcggacttgatgcagcggaatgtgcccgaatcggtgatatacatcagccctgcgaacttcgggcattcagcctcggagatgatcccttccggacagacataccaaaagtagttcggtcgtcgatcgtcaattgttccatccgaggcggataacccttgtaagatgcgcatcttattctgcttatggattgcctcattcaggaaatccgagtggctgatcttgatctcgcactcgtacacgtatccggctttggagattgccaaataatcggattcccacgcatagaagatgaagccgaccatctcgaaagcgggttttgtcagaattggatgattccaatacaacgcctgctggatgctctcctcggtgtgtttcggtttggtcggggttcctccccgtgtccctcgcattcccatatcgctacatcatttcgcgccagccggtgactttggcgtgggttgagtgttcgatgaagaatccgcccaattcaggcgcatagaaatcggtctgaatctccccgctggaacattttacgaggacattcttattcgcttcgggcatgaagtctttcgggtcgatccagcaggtgtagaatccctccatttcttgctcggcgagttcggccgcatgggtcattgccgcccggagctgccatttggcgtggtcgctcatctctactgtgagatgagccatgcacccgtctataaattcttttgctttctgacttttcattcctcggtcatgttttggacaaaaagtagttttgtcgcacatttgtcggggtctaatgcgcaggcccccgtttcatagcatgcacattcgctgcaatacgctttaatcgctttctcacgcattcgcatctcggcatcctgctcggcaagttcgatagcggtagacacatcccatcttgacacgaccaactcgcgccctccgaatctttcagcatactcttgtgccgtacacgtggcatgtgtaatgtattcctttgctttttcgcttttcatggctcaatcgttttcatcgttatcgtcatcgggatagctcacatcctcatagtttacgcagaagtcgaagcccggatcatcgtcgaatacgcctttggtttggcattcttcgtattttcggcagttgtagcaatgacattcgtttatttgtctgttgattttcatggttctattctttgcgtaatcggatgatatattcggcattcgcgcatcctttgtcgatcatctgaataccgaggagtttatcggtggcgtaggatcgtacccattcttcgtcgcatggggcgagttgcttactgtcctgcgtgttcccatacagagcgaaatgatcgtcttcctcgacaatgcggcagggaaaggattttgctatccgattcatgaatcggttgatcttttgtacatggggagggataggagctttgataatgcgattcccgtcctcgtcttcccgatagcagttcgggcaataatgatgactgcttaccgaatgccaatcctcctcggatgcttcttcttccgctgtgctgcggtcataccatgcactattatcattgctattgatgagggtatctccgcaacggtcgcacgtaacgccgtataaaatttgaggttcaatcatgattgttagctttcttttgttggtaattccgttaaaactccgatttcttttaccgcttcgaggacttgtagaatatcccgcattgccgaaagcacgcgagggtcaatcccctctacggaacaatttttaatcacgtttctctgaaaatgaatcagaaaatccatgtcgtgatcgatgattgcggttacaattttatttgccattgttatgctgctatattgtttttaatcagttgcgtgcaaagtgcctcgcagagaacccgtgccatattgacctcgacggcattgccgatgaatttcttttgatcggcctgcgtcccgacgaggacgtaatcggatgggaagcccatgatccgcttcaattcgggtatgcggagcatccgcatcttgatgtcgatgatgccgtacaacgccatgaaacgcttgatttttgccatcgctggactgtcatcagtggttacggcgattgtggctccttgctgcttcattcggcaggttacgagctggtgcttcgggttggtcgttaccgtcggagcgggggtttcgatgccgcagggcgttccgtttccgtactgcatatccacgaatgcgagcctgtcccttgtcgtcagcgtcggcgcgggtgcgtcgatggagtggttatgcccgttgccgtaatatgccgtgatgaacgagtggtgatcccatgtcgttatcgtccccgcaggttcctcgaccgatacgcatttgcccgctggactgcctccgtagtgcttggagaggaaatttacctgcgcgatgccgagccgattttgagttgcgacggtcgggcaaggctcgtcgatgctcggagcgtgatactttcccgtgctactcatcgagttccatttcaccaagaacgcctctttgcctccggctacgaactttatcaggcccgcataaattcgttccagcgtcgcatcgacgagcggttttttacgtccgaaaatactcttgccctcatccgtgaagtccagcacctcgcgcacgggcttccagcgttgcatctgaccgaataaccccgtcgcgccgtccttgctgtgcgtcggttcggggaacactatcgggaggctccctttggcgaagatgccgaaaaatcggcggcgagtggtgtatgctccgtaatcggccgagttgagaatccgatgcgcgaatcgatagccgtacccgcagacattcgacacccattgcaggtacagtcgtcctgcatctttgctgataggctttccgttctcgtcgaggtcgccccacgacatgaactcctcgacgttctcgatctgaatgtagtcggggttgatagcctcgatgtatcgaaagagatgctcggccaacgtccggctgtcggagtcgcggggctggcctcctttggccttactgaaattcgtacattcgaggctggcccacaggacgacgaacgcatcgggatattgccgccgcatttcggcgatatgagccgtcagcggggagagttccaacatccgaatatcctccgtgaagtgcagcgcgtcgggatgattggcggcatgagaggcaatcgcatttgcatcatggtttacgcatccgatgacctttgcacattgccgtccctcatatcgggcgttttcaacgccggtagaggttccacctgctccgcaaaataagtcgatgtatagcagtttcatatcgccttatcttttggtttcgcattcattccatcgacgcgcgatctcttcaccgagttttgtagcgtcgggtaatgtctctttgaagtcgcggtacaaatcacggctgaataactttatttggccgatagggatattccagccgcagtcagggtctttgatgcagagatcaacccgtccgtgattatcatccggtatgcagagtagttttacccgttgggtatcgaaactaccctcgacgaactgaaattttggtttgatctccatgactattcctcctcgattccctcttcaatttcaaactgcgccaatgcctgttggcagtcgaagcagaaaaagtcattgagtttatcatagattgattcggggatttcatcttcttcttcaaagttcccctcgacgcactccgcgccacccttttctgcgatatatcgttcggagtaggttttgccgttgatcgttacatcggttttccaaccgtcagcggtgatttcgatattgattttattcttgttcatagttgcattgaattattgattactacatatcctctccgtccatgaatttaccgaggccgaaccacacaaaggatttttgccaatggcgtttcccgacatattgggtaatcgaccagcgcgtaacgaccatgcgcgggtaggtgtctgtcttggggtcgtacccctttccgatcttgatatactctttcccgttgtcgccgcgaaagagcatgaaaaactgcgatttcagcgggctgttgtcatctacccatgcgcagatcaggatgcgccagccccgaaagatttttctaatagctccgatgtgaatcataagttagcgtattttacttgcgttacattttcgcagcgcacccacatcgggtcgtctgcatcaattcctgcgtcgtcgtaaagggcaaataatcgttcagggaaattgcatgagattactttgtaccaatgtcctccgtattcagccaacatcccagcgcagaatcgtaatgaatcgaaatcttgctgtgtcatagcctatcattttacaatttgagtagggttacagctgaaattccagtcggttacgtctgcacagcaagtgtgaatttgccccatgttcatcccgcattggcttttcacgatctgaatagccatctgacgcgaacctgctttgacttcgaatgttccctcgaagacgaatttcgctctgactttgtagctccgacttctcggataggtttttaattttacttctgtccccattgcgttgaattttgtgtttttgcgctgttttctgcgatatgccgcattatttcggattctccggccatcttatcaccattgcctgaaactcgcggcaaatcgccttaatttcatttatcccgataggtctcattcttgaaaatgatgacttcgagcatctcgttgaatcggtctgcgatgcggttgccgtacttctcgcggatttgcgactttgtgaggttggtcgtgatgaacgtgaagagctgcaaattgtagcggtattcgagcatatcgacaaccggattgaggacgtttccatagtcgagaacctctatcggttcgcgccccatatcctcgatagcgatcatcggcatattgcgcaggtcgcggaatgcctcgaaatcctttgcgaacatgactacctcctttgcatcaacgatccgaatgccggcccgtttgccctcgaaatgccctatattgttaagccaattcaccgccgactgaaaggcatacaggagggttgttttgccatttccgggtacgccgcagagcattaccccgaacttggcatcgttgcggatcaggaatgccgccagccgttcgatattggttttggtcgcctcgtcctcgatgaacttgcggtggcgatattcgacctccgcctgatatgctgccagcagaatatccgttgcctgcttcaagctcaccgaccacttaaaatttcccctcgtagtcttccggccgagtagcagtcgcttcagtccctcgacgtttatcacatgatctttgttgattgattccattgcgtttgttatcttctttttgccacgttgccaccgccgcgcgccaatttttcatcttgtttttgccgacataccatcctttgctctcgtaaaagttcacgaatcgctcggcgtccaccgtataacccttttccctgatataagaatctacctcctcaatagagggcggggaaaagcgtttttcgctttttccacttttcccctctctattgtcttttatattcttattattcttatcttctgtgcaggggtcgttgcacccgtcgttgcaggggtcgttgctcaccccgttgcaccccgtcgcgttattctgctggtaatcatcataattaactatcgcaattatcgttgcacgggtaacggggtgttttgagcggcttatcatctgatctgcttcgagtagagatagaaatttgaggatggtatgctcggatggcctacgtttcacgccgtcgtcatccttatacacccacctctcttggaggtagtggacggatgcgatcagttgtccccgtttgatggtgacgaggactgacttcacaaggcgtttgctatctttccattcggcgagcatcagcaggtcgagccaccacttcaaatagcggggccgttcccaaatccaatgctcccgaatggtttgatatatttttatccatcctcccatcatctatttccccacgaaagcaaagtagatttcagcgaattgttccccggcgtatttcgccagcgcagacgatttgaagcaaaggcgagacccgacatgcgcagtcgaatccgagggcgcgtcatccgaatccgcatacgcaaaaccggcatacgagccgtcattcgcatcaccgccgaacaggacaactttcttgcgttcctccttgttcatcttggcgatctcctccttggtgtagagccaaaaccaaggatagtagcggtattcgtctttggtaaactgcggcgtccatccctcgttgagagcggcggtaatgatgcggagtttgaggtaggctacgagatcggagctaatatccgaatcgtcttcgaggaatagatgccgtttgtggtattcttttacgagcggatggttctcgccgagttccttgaatgcgtcatcaaaggtcttgatccgctccatgatgttcttcgggcggaacatctccttgccgaagagattttcgagcatcttcttgttgtcggcattgccgttcttgtaggcatcgagcagattgtttttctcgatgtaaatgttgtttccgttcattttcagtatattttttaattcgtcttgcgtaaaacatttcgcgcattccatgatgaagtgcgacagatgcgctttgtcgcaccaatagccgaggcggttgcagtctgcgatattcctgacatcacggtaaatcgtgagttcgacaaatatctgtccctcttcctccttgcgggtcttgtcctgctttactatcagcattgcattcgattttttaatcactcatatcgacatggtgtacattcttgcattgatcgcagatatataccacatcgttacaccgatacaggtatttggaattatcgaactcccgccggatatgcccggcttccctacatttttttagttcggaagcattaaaatcgagttgccatccgaggtcggtatatccctttggcaagacgaatttgtttccgttagggtttggtatttttttcattctcaattttctttaatcgtggaataatcctttttgtcagtcttacggcattgatgagccgcgtatttccgctgtctatctgcacgttttcgagtatctgcggcaggcagcggatcagcgttgaaactatatcgttcggcacgggtcgcatatcagtagggcattttatcgagattgacctccaatcctgcacgggcgatatatgccggttttccggcgatttgccgtacttcttcggcgaatcctttggcattgctgttgccgtcggagagatgcagtaaaatcacctcatttgccgccgataggtcggtcgtccgcaaaatctctttcgtcgtctgcaattccatgtgcgaacccagcagccgtccccgcatggcgggaggcatccgcccgctgtcgatattgcgctgcaagattgcatcggagtagttcgcctcgatcatgatgtgattcaggttcggcagccggtattccagcatcatcgtatcggtgatgaaaagcaggcgtcccatctcctgatgctcgatgacgaacccgacgcatggcacatcgtggacgaccggcagtacgaagaccttgaagcctcccactttgtagccgtgcatcggttcgattatcttgcagaatacgcgatttctcggattggcggcgtcgaatacatcggcgagagccagtacgcggatgccgcaggtgagaaagtcgttcaacgaccttgcatgatcttcgtgtcggtgagatacgaggcatcctaccaccttgccgagctgccagccgagaccctttttgatgtcgcgcatcggtattcccgcctcgacgatcaaagtttcatcggctgcttcgaggatgtagcagttgccccgtgatgaactccccaaacatttcaagatcatactctcgtgccgtcagatcagtattcaggtgcaggagcgggtgcggcctgctccgatccggtttccttgacttcccccgtttccgtatcgacctcctcgtattccgttgccgagagatcgaccgtctgcgctgcggcattatcgagtgcgtcgttgcggttggacatggcctcatcctcgacatcgtgagccatcgcgttctgcatctcgacggagagatagccgtatttcgacagcaggcggcgaatcaccgttttcagagccatgtcgttgaagttgccctcccatccgactttcttgccgatgatgccgtcgttggctttggcgatgagctgcgcgacggtcgtctctttcttcacggagggagaataccgcttggcgtaggcggccatatcctcgacggttacatagagcgtcttggaaaagccgttgagcagctcgaaatagcagaagtagccgatgatcttgtcggaggtcttttcgccgtcgaaagcgatctctcccgtgagcttgttcaccttgcggacttcgccctcatagactacatcggcattgatcgtccggtactgccccgttcgcatggcgagctggatatagcccttgtagccggggatgaacgtcggcgtcggaactttgatccattcctcgcgtccggtctgctcgttggttacttttaccgagttgttgtaaaccacgatgtaggcgaaaccgagggccttgttcagaggtaggcggagggttgccgcgcggagtgcttcgatgatgattgccgagggcttgcaggtctgcaaggatttgtcgcccgtatagaggtcgatgagcgatgcgacgaacgtatccttgtgctcgccgagggcgttcttgaactgctcctgtattgacggagcattgattgttgctttgagcagatcgacggggcgatcctgctttgcgattgcttgattcattgtaaggttgattttgaatgttaattttctgcgagttttttaagagcggcgagttttgcactgagagacacgacttctgccatgttgggccgttcgatgaatgcggccatgctttcgattagccttttgccgcttcccatgatcgctatacattgggccgtcatgtcgctgtcttgcggcttctcgtttacgaggaggatgcaagacctctcattgcccccccctcctgcatcagcgtttcgatctcttttaccatctcctccacgcggaggataaatgcgcttttctgttcttcggttttcataattgcgttgaattttaagtgaatgattattagtcgaaaaggctcttcggttgagccggatttccgttgtgcttgatgacgagcttgtcgtcgagcgatacgaacaggcggataacctgcgattgtgtcggatgcagggtattgacgctttccgaaccatcggcgaaaatcggggcggaaatgccctcgaaacggcatatcgcgttgatgatgtcgatacccgcgttgaattgccctgcggtattggcatcggagaacggcacgccgttcaccattgcttcgcacgtttccacttcacctccgttgatctgtgtctcgaagaggcggaacttcacgaagtcgaacagcccgttgatcttgctttcgatggcctccgtgcgggctttcgagaaagctgccatcgtgaactcgataccctccaactgcgcgagttcttccgactgcatccggagagacttttcgagttcggcgatgcgctggttattcttctcgatctgttcgcgcttcatcagccgcgatttgagcgcgtcgattccgacggtaagagaatcgcgtccctcgcgtaaaaaatcatcctctgtggcggctatgggctgcgaaacttccttttcgagttctgcgatctgttctccgagtgctatatactcggtgttggccgcgatggtcggggtggcgtcgggttcgatgagttttgccgtgaggatgccgctcatttcgatttcggagatgatagatacctgctcggcgatcttttcctcgatttcgctgatatattgattcacctcctccatgcggagtttgttctccttgccgcgacgattgttctcttcgaggtcggcggcattccggcgattgaagttctcggtaatctcctgctggcggctctcgatctcctcgatctcgaaacggcgcttgcaggtcgggcaaataaactcgttctcatcgaatacgagcttgcgggcattgattgattgccattgcttgataagctcggcgcggcgatcggtgcatacctctacctctcggcgggcattggcgaggtcgcgctcggcggcggctttgtcgcgcttcgcccgctccaaatcctcggcagcggcccgctgcttggccttgtcggaacggtagagggcctgtacttcgtccttgattttgagttcgagggccagccgttcgtttttcaggtcgctgattttgcgcaccgttgcaagccgttcctcattcgcggcggcataggctttcgatgcgtcgttaatctgttcctcgacctttgcgagtgcctcttgtttttggcggagttcttcttcgagggccgcccaatcctccgcctccggcacatcgcggcggcgttcgtcgatacgttcggggatggcctcgatttcggttttcagacggcgttttttcgcggcgatctctttcttgtattcctccatcgtcttacccgtgagcgaggcaaggagggccgcaaaatcggcatttccggcggctatctcctcgtcggtgatacctccggccatacggaagagcatcgaccgctgcgtatctaccgactgcgatgtgaagtagaggggattggtgatgaacttgaatacctgttcgggacagatggcggcgatcttctcgttccactccttgaccgagcagggtacgttgttgtagaggcgttcctcttcatgtccgacgaactcctcgaccgccgagccgcgtttcttcgtccatttttcattgaaccgacggcagagggttacgacctcgccatcgaccagcaggacggccgatacctcgtgcgggagtttcgggatgatgtttccggcctcgtcgtaggtcttgatgccgaactgttttctgtcctcgctgttcttgccgaacaggagccatgtgaacccgtcgaagatcgaagttttgccgatgccgttgcgcccgtaaatctccgtgagcgcagggtcgaactcgaccgtcagatcgcgcagccccttgaaattgaggagccggatttctttgataattaccgttttcatttgcgttgaattgaatgtttactgaatactctcgatgtaatattgagcgacccttttccccgtcgtcgtctcaaccctcgttgctttgaacttgatttcgggatggcttttccgcaggtcgctgatgcgcgatgcgagtctcatgcacccgaagagccgcaatgcttcgagactcgtgatccggctgccgttcagcaagtaggcgagtatgcgcttgcattggctttcggattcctgaatattagggttgtcgttcatatctctgctatttatgcgttacggcgtaggtcgtgcccctgctgcggatttcatcgtcggtcgggacgcgggattgaagctgccatgcttcgatctcctttttcctgaaatagattttgttgccctgcttgtagtgcggaatcttctttgcactcgtcaaatgccgcacgcggctttcggatatgccgagcaacagggcgatctccgaggtattgagcacctctttcgaaccgagaagtagaagccgctcgatacgttccaatctttcctctactcccatgtgtcgtcctcctcctgcatcgttttcgacatttcgggaatcagcccgcgagcgtcccaatagtcgcacatccgaaagatgatataccaagccccgaatccgatgatcttcgggattatcagggcgagcagccatgctccgaacggctggtcgtctatggggacggagaatgtcccgataacggcgatcataccgacgaccatcagaacgtagtatcgccaattcaacagagctttcatatttcattggattgcacctccgattttgggaagaggccgtttatattcaggttgtagcgacgggctatgatactctgcgtcagctcgtcggggacttgccgaccgcagagccacatcttgaccgtattctcggaacgatgcgtgagcgcagcgatctcggcgatgaaattctgcgcgggcgtcggcttctttttctgctccgcatagaggtcgaaaaatgattttttctctgttctgctcatatttcgtcgataattattcacttgttaggtactatttttatatatttgcacccgacggattttattgatgcgtcaatatcttcccgtattgcaagggcaaagataaatacttttgtttggataaccaacatatttctttgttttctgcaaagaaaaatatttggcatagattgggatttgcgtttgaataagaataacattgtgatatacaaacatatatgacaggacagaagataaaggacatacttcgctcggagggcatcacaattgcggatgttgcgcggatgctcggacataatggggatcaacgtctgcatagtgccctgaaatccgaggatgtcaaaagtgggttgatcgaggatattgcccgtgttaccaacaaaagtgtttgttatttctatgagggtagcgggaatacggtagcgacggatcacggtatcgcggtatcgggtgattcgaatcagatcaatgcgctgtcggagaaattcatcgccctgctcgaaaaaaaggacgagcagatggatcggctcatcgggattatagaaaagaataataaatagaggtcggatatatgaaaacagaagagataaaggagttgttcgagcagttcgaatctatcgccaatgagtatgaggggatcgaatgttggagtgcgcgagaactttgcgggcttctcggctattcgaagtgggaaaaattctacaatgtaatcgaaaaggcgcgggatgcgtgtgtaaacgcaggagagcatgtcgaggatcattttccccgcgtcgggaaaatgatcgaacttgccaaaggtgcgcagcgcgagattgatgattatatgctgacccgctatgcctgctacctgattgcgcagaacggcgatccccgcaagccgcagatcgcatttgcacaaaactatttcgctgtgcagacccgtagagcggagttggtgcagcagagaatcctcgattacgaacgggtgcaggctcgcgcgaagctggcagaaaccgaaaaacgactgtcaggcgtcctgtatgagcgcggcgtcgatagccggggttttgcgattatccggtcgaaaggggatagggctttgttccatcttgatacagcattggtaaagcgcaaactcggtgcacccgattcccgtccgctggccgactttctgccgacgatcggtatcaaagcgaaagattttgccgccgaaatgacctctgtaaatgccgagcagaagaatttgcacggacagatggcgatagaaaaggagcatgtcgataacaacgtcgccgtccgcaatatgcttttgagccggggtatcgtccccgaacagctccctgcgggcgaagatgtgaagaaagtcgaacgacggcttaaatcggaggaaaagacgctaatcaaggggaagaagaaatgagccgcagacgggtttacagcgacaatacgttggctattatggagcggtttttcacggcgttcgacattgccgtacagaatcggctgataaagagtatcgccgaatattgccgggataattcgatagctccgcctcatttctatacgcagcgtaaagaccgcaatcgtggctatttcgaggtcggatggctcgttccgctggttcgggattgcggcatatccgcgacatggctcctgaccggacggggcatgatgttccagcaatagaaaaaggcatcgaaaccgatgcctttcttcgttagaatatgtcgggtatcttggcgaccgccgcctgcttgttcttgtcgagcacctttgcgtaaatctgcgtggtcgatagctcccgatgtccgagtagcttgctgaccgtataaatatcggttccgaggtcgagcatcatcaccgcgaacgtgtggcggccgcaatggaaggttatatccttatggattccggcccgcaatacccaccttttgatcgtttcgttggtgcaactcggagagtggatgtcggggaagatatgctcggcgtccttgccgcgctcgcccatgagttcggcggcctgcggcgggatgtcgagatattcctgtccgctggtcttcttctgtttgaagataatccgagtgaactctccctgctgatgcacatcgccccatgtcagacggatcacgtcggagcggcgcagtcccgtcaggcaggagaacaggaacgcccgcttgatggccggatattcgcattctgtttgagcgagccgctgcacctcttcgatggtcaggtacatgcgtgttccctcttcggccttgaaaccctcgacgcccctcatggggttgataggtatgatgcgatcctcgtatgcttgattcaggcaggcccgcagtttattgaagtagctgacccgtgaattgcgggacagcggatgatccttgatgcgatcccgctcgtcgcagctccacgcacacgcatctttctctaaatagtcccgaaatccctgcacccattcctgcgtgatctgcgagaatctgatccgctcgttcggctcgtatttttggaggtgtttcaggcatgatttccaattcccccaatttccggtactctccgctccgagccgccgggcgcacatcgcacggtagtagtcgaagaagagggtgtcggaggcatatgccgacttgaagccatgctcgccgttctgcacctcgacgatgcgccgtgccttgatcgagttggcgagttggagggtttgccggttcgcctccctgtcggcttttgtcttttcgggaatgaggtacagtttcagaaattcgtattcccgctttccgttcaggtagatgtcgaggtagaggctgacgttcccgttcgtcagcttcttgcgcctgatccggatcggttctttgatctccgccatatccttttgcgttgaatgatttttgttacttctgttactcattttggccgagtaacagaatagcaacacaaaagtaacaaattatttgcatccgtacagcaaagagatgagaaaattttgtttggcagataaaactgtaaatagctttgttattgctgtttatatgccgatgatgtgctggcgaaatggcgttttggttaattggaaaaatgacgacctattttccgatgcagaatttcgagaatatttggatgagaatatcgtcgttggtgatttcgcctgtgatggtgcccaggtggtggatgacctggcggatgtcttcgcttaagaggtcggccggacgatcgtcatcgagggccgtgagggctcggtgcagggcgtcgagggcttggcgcagggcgtccagatggcggctgttcgagatgacgggatcaccgtcgtagatgcttccggtgtcgaaagtcgcgcggagtctggcaaggagccgttcgattccttcgccggtttttgccgagatgaaaagaatgtcggggtttgccgacgatactccgtattcgaccccgcagccggaggataccttcgattcggtgatacgtgcatccgggctgtcgcatttattgacgatgagcaagcgagtctgttcggacgtaatctgtatggcgggaggtatcgggcaggtcgcatcgacgacctgaagtacgatttgtgcgcggcggatcatctcctgcgtgcggtcgatgcccatctgttctaggcggtcggcggtatcgtgcagcccggcggtgtcgatgaagcggaacagaacgccgtcgatattgagcgtctcttcgatcgtgtcgcgtgtggtgcctgcgatgtcggataccagggcccgctcttcgcccagcagacggttcagaagggtgcttttgccgacattgggttctccgacaatagcgacggccaccccttttttgatggcgttgccgagtctgaacgagtccgtcaggcgggtgatttcgctttcgatgcggtgcatcatctcccgcaggcgtgcacggtcggcgaattgaacgtcttcttccgaaaagtcgagttcgagttcgaggagcgaggccagttgcagcagttcgtcgcgcaacgcacccagtgccgccgaatatccgccccgcatctgggtcgaggccatggcgtgcgaagcccgggaatcggaggcgatcagatcggcgacggcttcggcctgcgcgaggtccatccggcctgcgaggaaggcccgaatggtaaattcgcccggttgcgccatacgagcgccggagcgaagcaggagtgcgatgatttcggagacgatgtagggcgatccgtgacacgatagctcgacggcatcttcgcccgtgtaggagtgcggtgcacgatagatggccgcgactacgtcgtcgatcgttctgtccccgtctatgacttcgccgtagtgcagggtgtgcccggcggcttcggccagcggtttgcgcccccgaaagatgcggtcgcagcaggcgatggcttcgggaccgctcaatcggatgacggcgatggctccgcccgaagcggtggcgggagcgacgatggtatcggtcgatgtgttcatcggacgaagattatcggcggatcgggatcctgagccgttggccttcccgcagcttgttggcgtttttcagcttgttcagcttcatgatttgtgccgtagtggttctgtaacggcgggcgatcgcacccagcgtatcgcctcgcttgaccgtgtaggtggtgtatgcgggggtggcgtccgcgagtttcttcttttcgatgttggccggattgatgtactctttcagataggtggagtccttccggtgaatctcctcttcgctggcgatgtactggcagaggtagtgctgggggagtaccagcgtgtagcttttgatcgtagccgggatgatgtccattttgtattgcggattgagtgtccgcaaagtttcgatgggaatgtcgagtgtcgaggctacttgtcccaggtggagcaggcgggtgacgcggatcgtatcggtcgccagcggcatgggcgggttttcgctctggataccgtgctgctggtggtaggcataggcataggaggctccgacgaaggccggtacatacccgcgagtttcgcggggcaggtattcgtagatgtcccagaaggtcgtccctccgccggcgcgggccagggctttgtttacgttgcccgggccgcagttgtaggcggcgatggcgagtgtccagtcgtggtagatgctgtaaaggtccttcagataacggcaggcggcgcgggtcgcttgcaccgggtcccgacgttcatcgacgaacgaattgatctccagtccgtaacttttgcctgtcgcgggcatgaattgccacagtccgacagcacccatcggagaggtggtcgtggtcgagagagccgattcgatgatcggcagggcacgcagctcgacgggcaggtcggccttgatgagctcttcctcgatcagcgggaaatagtagcgtgagaggctcaacacccggttgattgtcccgtaacgggtatcgacgtaacggcggatgtagtttttgacgatcggattgaaggggagttgcaccggtgatacgagtgcccgcaggcggttggcatagactgaatcgggggtcgtgtcactcgaggaagcgaggctgtcgatgtcgatgtagtcgttgaaaaacgtatcgtaggattgcagagtctgcttttcccgccagagagccacgagcgagtcgatctgggccggggtgagattgcgattcagttccggacagtaaggctccgtttgctgtacggtcgttttttctgtcactgttttctccggtttgaccgaaacgggagtatgggtcgatttcgaagcctgcttttcggtcttggcttttctcttggcacggcgctctttgcggctctgggcggttgcggtcgcgcagccgaggaggatcgaaagaaagagggtgcaggcgaggatctttctcatgatggaatcagaaattcaggttgaagttgaatccgaaagtcgggcggtgtccgccgacggtcggggaatagacgtaattcaccgccggcgtgaactctacgcttaaatcgtccgaaatgtcgtaacttttcagatgagcgtccacatgggcgtcgatgatttgcagcacgtaaagtccggcagtgatgatgatgcacaagtcgcggttgcggcggtaattgtccttgaggtttttgagaaattccgctgagtacttagtaccgaattcgcccttggctacaggcgggtcgggatggtgctccgggtctttctggtgctcttccagggctttgtcgtaggcgctacgatcggagtaggctttcttgaaacgcttgtagccgcgattgttccagtcgatggtatagatcgtggttgccagtccgcctacgacgaaaggcagtttccagtaacttttgttatagacttgtccggcaccggggaagatcgtggccagtgtcgtggctttctttacgggggaggcgtcgtagcggtagttgaccgccgcatcgcccaggaagtaaaggtaggaggcgaccgtaagcccgagatagatctgcctgcgcgtattgctgcggatcatacgggactgtacgtcgtccaactcctccgtgcgggccgtaccgttttccagcagggcgttgtattgtcgtttgagaggtttgtaggtgttgttttcgtggaagaagagggtcagtcccgcacctaccgttccgtagaggatcggcagcttccaatattgcttgttgtagatctgtccgaaaccgggcgctaccagcgagatccaacttacgcccgacagcgagatggtatcgcgccgggggcggaggtcttttcggcctgcgagcgagtcgggcgctccgagtgctgcgggcagggagtcggttttcagaagcagggccgagtcggggacgaattgcgggtgcagtctcgcagccagcgaatcccggagccgcagcgaatcgatgcccgaacgcagcagcgaatcgcgcagggtactgtcctgaggcagagagtccacccgcatcagtagcagagagtccgtaagatggtttttggccaggctgtccggtttgggcatcagaccgctgcgcacgaaagttttcgcgctacggtaacggtccaacggaacttgggccgatgcttcgcctgctccgcacaatgcgagaaaggcgaaaagcaccaacagacggatatatccccgggtgtgtttcatctatttattgttgcggatttcggcggaagcgcctcttttctcgaatttttcgatgaagcggtcgatgtcccggtcgtccgagaagtcgatcacgatgcgaccgccgccgtttttcgagcgtttgatgctgatctcctgcgagaagaatttttcgagctgctccaccagccgcgcatacgattcgggatactcctcgtcttcggccggagctgcgggttttgccgcagggtcggtcagtgcgcggaccagttcctcgatctggcgcacggagagtcccttgcggatgcactttttgagcaggcgcagttgcaactcttcgggagctccggcgatcgctttggcgtgtcccatcgagataagcccctccttgagggcgagttgtacttcgttgggcagtttcaaaaggcgcatgtagttcgacaccgtcgagcgttttttgccgaccttttccgagagcgcctcttgcgtgaggttgcattcgtcgatcagccgctgcattcccagggcgatttcgatggcgttgaggtcttcgcgctggatgttctccaccagggccatagcatgcaggttctcgtcgtccacttcgcggatataggcgggcagggactccagtccggctttgcgggcggcccgccagcggcgttcgccactgataatcaggtagcgtccgtcgtcggtgcgtttgaccgtgatgggttggattacgcccagcgtgcggatcgagtcggccagctcttcgagcgcctcttcatcgaactccgtgcgcggctgcgtggggttggggaagatcgccgaaacggagatctccgccatttcggtcatcggtttgagcctggcatccaggtgttcgctcccgaaaatggcgtccagaccgcgtcctaatcccttctgtttcataatgctattttgctttttgattgcttttgcggttgcgtttcaggagctccttggccaacgtgaggtaattagccgacccgacggcggaagcatcgtacaagatgacgggttttccgtgcgagggggcttctcctaaacggatattgcgttgaattattgtgtcgaaggccagctctccgaagtggttgcgaacttcgttcaccacctggttgttgaggcggttgcgcatgtacatagtcagcacgaagccttcgatttcgagcgccgggttcagtccgttcttgacgatgcggatggtgttgagcagcttcgagagcccctcgagcgcgaggtattcgcactgtacgggaatcagcaccgtgtctgcggccgtgaggatgttcaccgtcgtatagcccagcgagggggagcagtcgatcaggatatagtcgtagcggtcgcgcacgctctccacgatgcggcggatcacgtggtgtccgttctccatcttgggtagctcggtgtcggcggccaccaggtcgatcgacgaggggagcagccagaggttctttacgtccgggctttggaggattacgtcggccgccgtcttcgctccggtgatgcactcgtaaatgccctccaggttgatgtcgaagcccagtcccgacgtagcgttggcctgcggatcggcatccagcaggagaactttcttgcccagcagcgcgagcgacgccgagaggttgatggccgtggtcgtcttgcccacgccgcctttctgattggccaatgcgatgacctttgccatgtttgctgattttaacgggttataatcggccaaaaatacgaattttatcgggaaaaaccataacgatacccgaaaaatgcctatcttcgaagcgtaaaacaggtctttataccgaagataaaacatagaagctatggtacataccgattccacgactccgtccgatgtccgtccgcaagctcctgttggggatactcccggaacatccgatcggggacaaacgccgcaaccggctcataaatatcgatttccgacccttatcgacctgttggctctggtaggaatctggtatttgctacaattcgtcggactgcttgccgcccgtctcgccgggttcgattttccggactgggacttgttgcgcggcaacgtcgctccgacgcccgaacaacaggacgctctggcgcgttttacggctttcacctacctggtgacgatgggactgatgattcttttcacgctgttctatcgccgcttgcggcacggaacgcgcaagacgctgcgcttttcggcgcggggcctcaatccggttctgctgctttggggactggtgatgatgctggctgccggtatcgtcatcgaaccggtggtggagctgcttccgatgccttcgtccgcagtttacggccggggcttctgggcgatcattacgctggtggttatggctcctctgttggaggagttcctctgtcggggcatcattctcgagtcggtgcgggccaagtacggcgtcgtagcggctttgttcctctcgtcggcgttcttcgccgtgttgcacggacatccggcgctggcggtcaatgctttcgtgatgggcctgatcctgggtttcatctacatcgagaccaattcgatcttttcggtcgttctgctccatgccatgaacaacggcgcggctttcctgttgattatggtcggactggacggggccacgatacgttcggttatcggcagcgatacactttatacgatcgtttacgtcgttgcgctcgtgcttttcgccgcatcgggctatatgatctaccgtttgctggcccgggtgaaaaagttggataaaaatacgatccggtaacctgttgtgacggtcgggggctattttgcggcgtaccgcaggagcgggatcgtcggcgggtatcatgcagaagtattgtctgtgccggttttccccggattatctgcaccggagcatccggttttttcgatacgataaattagggcgtaatgtaatattcgggatgcacggtacgttaggttcgggtaaaaagtatcttttttagacgataggatgcgcctcggcttaactcaaataaatttggttaggctctcggctttcattatctttgtcccttgtagttatgagtttttgtgccaaaataggagctgttctgctgctcgtacttgcggtagggtgccaggaagtgccccgctattggggcggaggtcgggtcgtgttggccgaggctgccggtagaaaattgtacgcgcgagaggttaaggctgcgattccgaagggagtggtcggcgaggacagcgtggctttcgtaaaccgttatgtcgaaaagtgggtgcacaaacagcttaaattgcacgaggccgaagaacttttctccgatgccgagcaggacatcgattcgctggtcgaggagtaccgccaggcgttgttgatccgtaagttcgaccagcatctgatcgaggagcgcatcgatacgctcgttaccgccgatcagattgctgcctatcaccgtgaacacgcgtcggatttcaaggtcaatcaaaccctggtcaaggggcggatcgttcgcttcgacgccaacaaccggcaggcgccgaagctgcgcaagttgatgacgcagcccggctcatcccggcagcaagagttcgccgacatctgtaccaagaacaatttcgtactgaacgatttctcctcttcgtgggtgaccttctccgagtttctgggctatctgcccacattgcgcaaccagagttacgacgccctgctctcctcgcgggccgtacaggagatgagcgacggtcattcgcgctactatttcgaaataagcgacgtgcttcgtccgggcgatcccgaaccgctggagcgcagcgaggcgatcgtgcgccgcatcctctacaaccagcggcagaacgagatcattcgggcctacgacgaggaggtttaccgaaaagcggtcgaggaggggagagtgaagatccatgaagaagaaaaaatagagaactgatgagcaagaagattctgttttgcgcagcgttggtgctggcgatttttgcaggggccgcccagaagcggcaggtgatgctggaccgcgtggtggccgtcgtcggcggatcgtcgatcctctggtcggaggtggacgaatatgcgggcgagctggtggaacagcgccgccagcagggttacacttcggaccgcgatccccacgacgaagcgctcgaacaactgctgatgcagaagctgctgttcaatcaggcgctcatcgattcggtggatgtcagctattcgggcatcgcacagcgggtggaagcccatttgcaggcgctcatcgacgatgcgggttctatcgccgcgctcgaaaccaaacagcatatgccgatcttcaacgtgcgcgaaatgctgcgtcagcgttacgaggagcaggcatacgcccaggctatgcagagttccgtagtagggaaaatcaaggtgattcccggcgaggtggagcgttactacaagaagaccgatccggacagtctgccgactatccccgaacagtacgtttatgcccagatcacccgtttcccggcgtcgatcaaggaggccaagcagcgcaccaaggagcggttgctggatatgcgcgagcgcatcatcaaggggcagacccgtttcgacatcatggcccgcatgtattcgatggacggttcggctatcagcggcggcgaactggacccccagcctttggacgggttcgtgcggcagtttgcggacgcattggccgatctgaagccggggcaggtttccgaggtcgtcgaaacgcaatacggttatcacctgattcagttgatcgaccagaaggggcgtatgtaccatgcgcgtcatatcgtgttgcgaccctcctatacgctcgaggagctggcggctccggcccgtatgctggacagtatcgcaaacctgatccgtaaggattcgattactttcgaggaggcggcccggaagttttccgacgacgataattcgaagatgaacggcggcgtggtgaccaaccacgatttgctggaggcggcgcattactatgaggctggtgcgaccgaaacacgctttctgaaggaggatttcggccgggccggtggcaagagcctcgacgactacaatgccctgcgcaatcttaaggagggcgaaatttccgacgcctatcagaccgaagactggatgggcaaccagctcagcaagatcgtcaagctcgtgaaggtgatccctccgcacaaggtttcgctcaatgaggactatattcgcgtcgaacagctggcgctgaacgccaaacgcgagaaagtgttcaaggagtggctcgacaagaagatcgagggcatgtacatttatatcgatcccgaatttcgggacggagagttcgaaaataagaactgggtaaaatagagatcgtccgatgccgaagggattgcgaaaaatagtgtgcgcactgctggtcgcaggtgtcgccggaggtgtgatcctcgcggggaacaggccgctggccgttcccgttgcgggtgttcataccccgtcggctccgggtgctccggcccaggaccccgagtcgaacaaggtggtcgatttcgtcgccgaccggggatatcccattccttacggcgatacgaccgcgacggtgctcgtagggcatttcgcggcccagcacaacggggcggtcattacctgcgacagcgcgatccgctacaacgacaagcgcatcgagtgcttcggcaacgtactgatcaataaaaaagagacatacatttacggcgaccgggccgactacaacggtgagatcaacgaggcgcgggtctatgctccgctggtgaaggtcgtcgatggggatgcgacgctctatacttacgatttccggttcaatacgctggacaatatcggtactttcagcggaggcggtatgctgaccaaccgcgagaatcacctcgaatccgaccggggctactattatgctgatacgcaccagattatctgtgtggatcgtgtcgagatgcgcaacgacaagtacgaactcaagggcgattcggtggtgtacgatacggataccgaccaggctcatttcttcgagcgaaccaacatctggaacgaaggcggcgattacatttatgccgaccggggacgttacgaaaagccgcgcgagctttacgtgctgactcgcaacgggtatgtgatgaccgaaaagcaggagctgtggagcgacagcctcgactattaccgggagtccgggcatgctcttttgttccggaatatccagatcgacgacgccgagcacaaagtgctcgctttcggcgattacggcgaatattggaaggagccgggcaatgctctgctcacgcagcgaccttcggtggtcagctacgatacgagtcagagcgattcgctctatatgtgtgccgattcgatgtttctttatacgatctcgaagagcgagcaggcacgtgccgattcgttggcgaaggtgaaggcaaaggcggcggcattggcggcagattctctggccggctctaaggggggaccgtctgtggattcactggctgcgaaaccgagtgctgcgggtccaaaagcctcgcaggatggatcgcaggcggatgccgctgctccgcaggctgcggccggagccgtcgaaacctcgtccgaaactgcggatgccggttctggttccgctgcagaacccatagcggctgttccggctgaaaaaggaggaacggggggcgattctctggatgccgccccagcaatagatacgcttctttccgacagccttgatcgggtggggggcggaatgacccctgccgattccgtggccgccgtttctgcggtggatacgcttttttccgacagccttgcgcaggccggtccaaaatcgcttcctgcggattcttccgtgcatattctttccaagcgggagcggaaagcccaggccgacagcttgaaagctcaattgcgggcacaggccgacagcatagcgtccgtgaaaaaggcgcaggcggcagcggcccgcaaggagaagctggcgcagatcgccaaagcacgtcaggctcgggctactgccaagctcgacgctgcgaaacagaaggaggaggcattgcgcagaaagaacctggagcgccgcgccgaacgtatggagaaaatctgggccaagcggcgtgccaaaaccgggaaggcgatcctgaaaggcaagcttccggcgtcggctctcgattcgctggtcgccgactccctgcgggaggccagggcttttgccgcgttggattctttgttccgggactctcttgctgcggattcgctgggacgcgattccatgcagctcgattcgctcaaggccggggttgcggcagcggactctttgcggggggattcgatcgctgcacctgctggagattccctctaccggttggtcaaggggtatcgccgggtaaagatcttccgcaacgacttccaggcggtctgcgattccctggtggccgtttccacggactcgatgatcctgctctatatcgatcccgtgctttggaatcaggacaaccagatcacttcggacgtgatgaagatctataccgaaaactccaaactccagaaagcggaattcgtcggccgtccggttatgtcgagcgagatcgacacgatgacttacaaccaggtgacgggcaagctgattactgcctatttccgcgataacaagatctatcgcaacgacgtggacggtaacgtgcagaccatctattatatgcaggaggacgattcgcccgaaccggtggggctggtttctatccaaagcggtgcggctacctactatatcgacaacaatacggtcgaaggcattacctaccgcaatcagccggtcttttcgatcttcccgatggataagattccggagacgcaggctctttttctcgaagatttcaagtgggagggacaccggcgcccggtgcttcgggaggttttcgaccggacgattcgcccttcggagcgtgcggagaagagtgcgctgccgcgacccgattttccgatcacgcgccgtatcgaggagtataaaacgttgctcatcgagtccggaacctgggtggaccgcgatgacaagctgacgcccgaagcgctcgagtggcttcactggctggggtattgatctcagtcatacggctctctttgggctttcggataggatataatcggccctcccggattcatcccgtcaggtagaatccgggagggccggtttgtcgggtcggtgagaaattctttcgttttaggcggaagaggggaagatatgcgctatttttgttctccgaatcaaaagaccgtgcttcggacgcgccgtattgtcgagctgcggagcggtccgaaggatgcgaaagttgcgaaaaaggttccgtacctggagtgcggagccgtcggtaaaaagagtcgatttatgaaaaagagtttgatcgccctggctttcggcacgttggctctcggcatggccgagttcgtcatgatggggattctgcccgatgtggcgagggatttgggcgtttccatcccccgggccggggacctgatttcggcctatgccatcggggtttgcgtcggggctcccgcgacggtgctcattgcacgtaagcgggcgttgaaggggattctgctcgctcttgccgctcttattgttctgggtaacgtctgcgcttcgctggcacccgacttttgggtgctcttggcgatgcggttcgtgtcgggcctgcctcacggggctttcttcggggtaggttcgattgttgcggagcgggtggccgatccgggacacaaaacccaggccgtgtctatcatgatcctcgggatgactgtcgccaacctgttctgtgtgccgttgggtacctatttgggcagctatctttcgtggcggctggctttcgggatggtcgggctgtggggaattatggctctgctgctgatcgcccgctgggtgcctgccctgccggcgctgcccgatacgggattgaaggggcaattccggttcctcggttcgcgggctccctggctgattttgttggctacgctgctggccaatggaggagttttctgctggtacagctacgtgactccgaccatgacgcgtgtggcgggcatccccgggcaggcgatgacagccgtgatgatggtcgcggggctgggaatgctggtgggtaatctcgcgggcgggcatctgtcggaccgcttctctcccgaacgggtcgcccgttttattcaggggatgatatgtctgttgctcgtagggatcttcttcgcggctcggatcgactggctcgtgattccgctgatgttcctgacgacggcttcgctcttcggggtttcatcgccccagcaactgcttattctggagaatgcgccgggcggggagatgctcggcgccgcgtcgatccagatcgcgttcaacctcggtaacgctttgggcgcctacttcggcggtctgccgatcagtttcggtctggggcctcaatatgccgccctgcccggtgcggcgatggccctgctgggcttcgtcatgttctccgtctattgcagtctttacggtcggaataaaactcatagaatattgtcggaaaatgaaatgcgcggataatcgggaagagctgttcccggtggtcgatgctgccggacgtgtcgtcggccgggccacgcggggcgagtgccacggcgggtcgatgctgttgcatccggtggtgcacctccatctgttcaactcccgtggggagctttacctgcaaaaacgtccggcgtggaaggatatccagcccggacggtgggatacggccgtaggcggccatgtggattggggggaagagcctctcgttgccctgcggcgcgaggtgcgcgaggaggtcggcgtgacggatttcgtgccgcagcacgtgctgacctacctgttcgagtcggaacgcgaacgggagttggtctatgtctataagacggtgtacgatgggcctgtcgtaccgagcggcgagttggacggaggccgcttctggacactgcgcgagatcgccgaaggagtgggcggcgggatctttacccccaatttcgaaggcgagatccgccgtgtggcggagctgccggatgtcgggcgttgagtccccggttccgttcgctgcgcctcttcggaacgcagggcggtctgccgtccggcgaccgctaaataaagcacatgatcagaatctgaatgatgatgacccgcaggaacatgcatacgggatagaccgtcgcgtacgccacggccggatgatcgccggggatcgagtcgttggcatagttcagcgccatcgggttggccatgctgccgcacatgatgccggctacctgtccgaaatcgagtttgaagaaccgcagcgacagggcggctacgataacgatggggacgaacgtgaggaggaatcccagtccgatccagagcattccttcggggcgcatgatcgtttcgacgaaatgggcgcccgcttcgagccccaggcaggccagatagagcgacagtcccaatgcccggagcatcaggttggcgctcaacgtggtgtaggtgacgatgtggatgcgggggccgaaggtcccgatcaggatgccgaggatgatcgggccgcctgcgagtcccagtttgacggggaggctgatacccggtaccgcgaaagggatgcttcccagcagcaggcccaggagcaaaccgatgaaaaccggaatcaggttgggttcgtcgagctgtttgacggcattgccgaggattttttcgacgccttcgatcgcctgcgcttcacccactaccgtcaggctgtcgcccagttgcagcgtgagatcgggcgtggcgagcagttgtacgcccgaacgatgcacccggctgatgttgatgccgtacaggtttcgcagacgcagcgagctgagtttgcggccgttgatttcggggcgggtgacgatgatcgaccgggagatgagctggctgtccaatgcgttccagtcgatgtcgtgcgtattccagtctttctgtacccgctcgccgaagaggagttccagtgcctgcacgtcgtccggcgaggtgattaccagtaccagatcacccgattcgagggtcgagtccgaagtcggaatcgaaacctgcccggcacgccaaaggcgggagatgacgaaatggtggtggctgtatgccgcgacgtcgcggatgcttttgccgacgacgccggggttggaaatcttgaattcgacgatgaagatattctttttatgttcggcgtccggttgcggaatgtccgagggccgggcgaagagtttgcgtacggcgatgatgcccagaatcacgcctacgacacccagcgggtaggtcaatgcacagcccagcgtggcgttgttgctgtccaactgcatctgcgagagcatctgttgtgccgcaccgagcgccggggtgttggtcgtggcgccgcacaggatgcctgccatgtcgctcatgggaacacgggccgcatagccgagccctacggccagtgccgaacctgtcaggacgatgagcgtggcgagcgaaaccagccggatgccgcccgagcggagcgaactgaagaaaccggggccgacctgcaatcccaatgcatagacgaagagtacgagcccgaaactttcggcgaaagccagcatcgaaggatcgaccgagagtccgaaatggcccgctgcgatgccgatgaagaaaacgaacgtcacgccgagcgaaattccgaaaaaacgcactttgcccagcatcatgccgaacaccgagatcagcgagagcacgacgacggcttgaatggccgaatgttgggtaaaaagatccgtaaaccagtccattttgtttcgttccgggattgttccggctgcaaaaatagctgttttttccgaatggagatgtgcggatgcctctttttgccggatcgcaggaatgaacgggccgaatatccttattgccagggacgggcgtatccgtcggatcatttccggggagagggtgtatggcgccttgtcgggaagcgctctcttcgcattttcggagtaggccggccggcgagttcgcggagcgtgtcgccgttggcgcggaggatggtcaggatgcgctcctcggagagaaagaattcctcttcggagaggattttcagggtgtcgtcgaagcgcagacgctgcgtttcggtccagtagtgatagcggtggcagagcatttcgtcgcgtcgggcgatcagggctttgttgcgtcctcggggcatgtcgtgtgttttttagtcggatgaaacagtgtcattgccgtccggaagagtccggcggcaggcggaaatcgaaaaaatagagaaaggatgggcgcccgtttcgggaaacgggaagggcgcgtctgcaaatatacgctgacgaaaaggcgaagtcaagaggtcgtcgtgtttttttgagttttcgaattaaatattattcgtatacttgcacccgcaaaaggtatccgtatgttttttcgaagcgtgcggagtaatagggaatccggtgcgaatccggaacagtgctcgctgctgtaagtcctgtttcctttcggggaatagttcgatcgctctcttttgccactggccatgaagccgggaaggcgcgacggacgggatgagtcagaagacctgcctttgcacgaagattttacacctgcgggtcacgggatggaatcacgaatgtcggttgctctgtttgctcgatttccccattcagtcgatttttccggacccggtgttgccatgagtccccgaagcgtatgctttgcggcgatctttcgtacaggaggaaacatacaatttattaaataataaaagattatgaaaaaaagagtatttttggctttgctggctgcggctgcggtaactttcgtcggatgttcgaaggacgacgacgggccggacgaaggaccccagacctatacgatcactttcgagggcgacgactggtcgccgctggtggtggcgaactataacggcggtaaggcgatgtccgtagtttacgaagataaggcgtacacctggaccgatcagaccacgcagctgacttcgccctgtcccgaaggttggggatacccgtttatggtatcgtcctacaactccaaggatatcgagaagttcaacacctatgagtttgacctctacctgtacaatgcacagaacgaggatgctactacgggcggcggccacgacggatcggataatttccttatcggttacggcaactacgacgaagcgcaccccgactatggcgacagccgtcctattttcgctttccccgacggtgtagcgcgtacgatccagagctgttacatcaattcgacttgctattttttgagtgtggcggccaaaggcaatgcccttgcacctgcgcttgaggagggtcaggatgtactgattcatgctacgggttacgatgccgcaggtaaggagaccggcaccgtgacgatgactttcgcatcgaaggacaagctgattaaggagtggaccaaatgggacctctcttcgctgggcaaggtggcgaaggttcgtttcaatatgacgggcggccccgataacggttatggcttctcgatgccggcctattatgctctggatgacattacgatcgagctgtaatgtttttccggagagtttccggaccgatttcggcgatcgtttccgacttgcggaaaagtccgtgacggactgcaccgggcggaggcgacgacttttgaagataaatcgtttttgtgtgcgtcggcagggcgggtttccgctctgccgcgtgccgtaaacgcgaatatatgcaacgtgctatgtggtttttttcgaaaagatatttcccgttttgggcggtgtttgcggcgctgctgacgaccgcctgcaacaaggacgaagtgattttggacgaccgggatcatgctcccgtcattacgctcgacagcgagtcgggggtttataccgtcaagatgggccgggagctgaccatcgctcctacggtggagtatgccgagggagctacctactcatggatcgtcgatggcaagctggcaggttccgaaccgacctatacggccgtctttaccgaactgggtgaagtgtatatcacgttccgtgtcgaaacggctgccggaaaagctgaagcggagctgcgggtggatgtgctggagcttactccgcccgtcatttcgctcgcactgcctgccgaggggctcaaggttctgccgggtgtcgaatataccttcactcccgatattcagcattcggaccaggaggacttccgctgccggtggctttgtgccggcgaggtcgtttctacgcagatgagctataccttccgggaagaggcggtggggagctacccgatccgtatcgaggcatcgaacgacgacggaacctccttcaaggaatttgtcgtggaggtcgtggagaagatgccttcggaggtccgcttcgaaaagctctctcattactgtaaaacgaccgatcggagcacgttcgtcggccgtgcggtctatcttgcgccgtcgctggcttatatcgccgatccgcagttcgtctggtcggttgatggggaaccggtcgtagccgaaacgggtgccgtgtttaagtttacacccgacgggccgggcgactataccgttcgggtcgatgtgaccgaaggcggcgatgcttccgagcgtcttacgcgaaacatcgtccgaggggttgctacgctgtctgccgagatcgtcgttcatgcctttgcggacgaggagcagcgccgacgcccggcgagtgtggcgagcagtcgtttccagcatgcggtttacgaatttctgcccgctcccgggcagttggtcggcgaaaagaccgaagccggatatacgggcaacgagcgtacccatgaagatgccgtggcttatgcagccgggaggctggaggcgcggagttatgtttcgctcgggggattcggcggttatctgatcgtcgggttcgaccacagtatcgcccgaatggaaagcggctatgatttttccattgaggggaatgcattcgacaccagctcggagccgggcgtggtgtgggtcatgcaggacgtgaacggcaacggtgagcccgatgacgagtggtacgagttgcggggcagcgaaacgggtaaggaagggactgtttccggttatgccgtgacttattaccgccctgccggaagggggatggacgtgcagtggaccgattcggaaggtcgcagcggcacggtcgaatacaggggtgagtttcacgaccaggatttctattatccggcttgggccgccgatacttatacgttgcgcggtacgctgctcgaatctcggaatatggtcgatgacagagggttttggatcaaccgcccttacgagtggggttatgccgacaattacggaagcgactgtcttgcgggtggcgatgcaatggacggaaagggacagagcaacggattccgaatcgccaatgccatgcagcccgacggaacgcctgtcgaactgaagtacatcgacttcgtcaaagtacaggtgggggtcaatgccaagagcggtccgctgggcgaggtttcgaccgaagttttctccttcgccgatctttcgatcgcggagtaaggctgcggaacgaatccgccggattgcctctcttttccgcttgggacaggagaagagttgcccggaaacatctgcagagagagaatctacatcgacaagagaagttcccggaaacgcaaatcgtttccgggagcttctctcttgtactgcttgcggtcggagtcttcgggtttcgtttaccgcgcttaaagcgtcagggggaaacccgcgtagaaatcgaggatcttggtgcggaatatgaattcgtatttggcctggatctggtcggattcggccttctgcatgcgggtcttggcgtcgttgtagtcgaaggtcgtcgagcggcccgcagcgtatttctcggcttcgtacctgaaggcgatctgtgcggaattgagcgctttttccgccgaacggtatttcaacagggcggcatcggcctggtagtaggccgtttcgatctctttttgcagggtttgctcggcttcggtcagggcgagctgttggctccgcacgcccagtttggctgttcgcacgctgttgcgggtcgccatgcggttgaagatggggatgttgatcgccacccctacgtattcggtgctgttgttgcggaactggcgcccgaaagcgggattcaccgcacccgtagcgaacgagtgatagacgttggtgccgtatcctcctgtcagtgtgatctgggggtagtaagccgcacgggacatccgtactgcccggagagcctgctcgaggcggaagcgctcggcctgtatgcggggtcggttgtccagcgcgtaggagagcacttcggccgggttacgcaggtgacgcatcgactctacggtgaggctgtcgaaagtcggggcgactatgtcgaacccttcggcactcgtccggttcagggcctggctcagggccaacagggagagcgagaggtcgttgcggctttgggtcagtttgtattcgtctgccgccagcagggcttcgttttcgtaaagcaccgactcggcgactttgcccgttcgcacctgttcccggctgcgttccacctgttgtgtgctcaaggcgagcgcttgctctgcgacgtcaaccaactcctttgcgaccagcacgtcgaggtaatacgacataatattgaccgatacgtcttcacgaatccggtccaggtcttgggccgcggctttcaggctcagcttgcccgctgcgatttcgtggttgatgcgtccgcccatgaagaccggcagcgaggccgaaacgccgagcgaacccgacacctggttgttgttggcgtaggtgttgttgctgatgaggcttcgtccgaagctgaagttcgcaccgaggttggcaccgaggtcgggcagacggctgtggcgcgaggtgttgagttcgatggagcgctgttcgacttgcagcgcctgttgctggatctgtatgttatgttcgtgggcgtatcggatgcaatcgtccaggctccagggcccggcttcaggcaccggggtaggagtttgcgcatgcaccgtgctgcccgcgagcagcagtgcgatgaaaagagttccgaatttcatggtcgcagggatttagatggactgttgttggatgttgcggactttgtccgtttcggtgacgccggatacgatttcgatgttcacgccgtccgacagcccgagcgttacgtcccgtttctcgaaggtctgttcggggctctcctcggggctggtgaggatatagacgcagggcttgccctcttcgaactggatggtgctttcgggcagtgtgagaacaccttcgcggctgtcggtcacgatgctggcattggcgctgtaacctgcacggacgaagaccgattccgggatcttggcggcggccttcacctcgaacatgatgataccgttcacatcggcggctttgggcgagatgtactccagcgtggcttgcagcacggtaccctgcatggcgccgatggtcagtacgacgggcatgccggcatgcaggcggccgatgtcggtttcatcgacattgccccggaagagcatgtcgcccatgtcggcgaccgtggcgatcgtggtgccgtcgttgaaggtgttggcctggatcaccgagttgccgaccttgatcggtacgtcgaggatcatacccgtgatggtggagcgtatctgggtgttgcttaaatctttgtatcggttggtgatgccggttttgacgatttccaggttgtcttcggcattctggaactcctcttcggcctggcgcagggtggtctgccccttctcgaactcctcctgcgataccacgcctttggcatagagggcttcggtgcgttcgaactccttgcgggtctggtcgagcgagagccgggctaccgtcacgcgggattcggcggcattgagggttcccatttcgggaatgaccttcaccgtagcgatgacgtcgccctgttttacacggtcgccggccttgcagagtacctcggaaatgatacccgagatctggggcttgatgagcacctcgtcgcggggttcgaccttgcccgaggcgatgacgtactgacggatcgtgtcgcgcacgggggttgcgagggtgtaaaccaccttcacggggcgggttttgttccagaggaagacgaatgtgccgacgagcagcgcgaggaacaggatgcccaggaaaatcttcagaaactttttcatattatgtcggttttttgcgtttgtttcgagtttcggggtttactcttcgcggatcgcatccacggctttgatccgcagtgcccgggttgcggggatgatacccgccagcaggctgcccaggacgaggatccccagcgcgagcattcccataccgaaagagatctgccacgaaatatcgggcaggtgttggtccatctgggcggcccgcgcgtagaaactgtcggcgacggagaggacgcctacgcccgcaccgaaaccgaagatgcccgcgataaaagtgaggatgaagctctcggagaggatttgcgaaaggatcgtcaggggcgaagcgccgatggcgcggcggatgccgatctcctgcgtgcgttcgcgtaccagcaccagcatgatgttgctgatgcccacgatgcccgcgagcagcgtgcccagacctacgatccacgtaagcagggagatgcctcggaagagcctcatgatcttgccgaagacctcggaggtgtcctgaaaatagatcgccttcttgtcgtcgggagcgatcaggtgccgtgcggcgatgctttgccggcagtcctggatcacctcttgggtcggttcgtccgcatatccggtgagtgccagcatgtcgatcgtccgtcccagtccgtacatttgctgtacgagcagcgccgggatgacgacggtccgctccgggtcgctgaaggccatcataccgcccaggggtttggtaacgccgacgaccgtgaagtaggaactgccgatctggatcgttttgcctgtgggatcttctccgccggggaagaggtcgcgccagacctgaagcccgattacgcagactttgcgctggcgcagttcatcgacttcgttcaggtaacgccccatgagaatctgttgaggagcgatctgctgcatgtcgggcgagtagcccatcagtccgaattcgcctttgtggtcttggtggctcatgttgcgttgattgccccagcaaacagccgagatgtattcgatgcggggtagtttccggagcgcttccaggtcgtcccagtccagttcccagctgcggcccgtaggcataccttcgtaagggacggaggtgcggtcggacatgatgaaaatggcgttggtggccgtgccgcccagttgggcgcggaacatgcggcccagccccgtgccggcacccagcaggacgatcagcatgaagataccccaaaagacgcccagcgccgtcatgatgctgcgcctgcggttgcgggagatcgtctgccagatttcgttccagcgatccgtatcgaaaaatcctgtcatagtttggttccttttctttcttccgggtgtcccgggctcgttgttgctgttcttttttcggtctgtcgtagtttcgcggctgggccgcgtattcaattcttacccacccctcaatcccctcctcgggaggggacttttgtcgtccttcggactccggggtgcttccttatctgttccccggtcgttgtgggattcgttgtcgcgcagttatttattgtgccgcagggcatctacggtcttcaggcgggcggcccggcgggaggggatgtaacctgcgatgagtccggccagaaccaggacgatcgtcgcgcttaccgctaccgagaggttcaacgtcggattgacgaagatgttgaacgtgttctccccaccgggcggagtttgtgtcatgagcttgttcactccttccatggcgaatacgccgagcaccatcccgatatagccgaatgcggcggtaatcatcaccgattcggtcaggatcagccggatgatcgacgagggtttggctccgagcgccttgcgaatgccgaattcgaaggtgcgctcctgcaccgttaccagcatgatgttgctcacgcccacgatgcctgcgagcagcgttcccagaccgatgatccagatgaagaggttgataccgccgaagacgagcatcatgttcttgtaaccttccatgcggttgtagatccagacggcgctttcgtcgtcgggcgcgaaggtgtgttcggcggccagacgattgcgtagccgctgttcgaattcggccattttctgatcggtgtcgatgtctttcaccgaaagataggtctgtcctacgctcggatcgctgtggttgaagagtagttgggcggtcgtcagcgggatgaaggtgaatgtgtaggagccgaactggtccatctcgaaaacaccgatgatgctgtacgatgttccgttgaccaggaggtgctgtccgacgggactttgaccgtgaaacaggacatcccgcacgtttttatccacgacgatcaccttgcgccgctcccgaaggtcggtatcgttcaggaagcgtccgtcgagcaccctgacattcatgatttcgcggtattccgggtcgctgccgactacggccgcattgttcagaaagtcgcgtccgtgggagaggttgtattgtcccggtccctgcacgtgggcggaaaccttgtccacttcgggaaattcggtgcgcaggatctccaggtcgcggttggtgatgttaatgcgccgccacttgtcgtagcccttgtagggttgcgaggtccagccgccgttgatgatgaccgaattgacggccatcgacccgaaattggagagcgtgccgtttttcagtccgttgcccgagccgagcaggatgaccagcatgaagatgccccatgcgaccgagaagcccgtgaggaacgtgcgcagcttgttgcggcggatcgacgcccagatttccaacagcaactctctcatggccggaggttttggatcgaaccgatcacgccgtccttcaggtggatgatcttgtccgtctggtcggcgatcgactgttcatgggttacgcagatgatggtcatgcccgtcccgtttacctgccgcagcaggtccattacctcctgcgaggttttgctgtccagggcgcccgtaggttcgtcggcgagaatgatctggggcttgttgatcaatgcccgggcgatggccacgcgctgcttctggccgcccgacatctcgttgggcatgtggttggcccagtcgcggagtcccagccggtcgaggtattcgagggcttcggcattgcgcttgcggcgcgaaacgccctggtagtagaggggaagggcgacgttctcgaccgcgttcttgtagtttatcaggttgaacgactggaaaatatagccgatcatgttgttgcgggcagcggcggcctgcgtctcgctcaggtgtttgatcaggcgcccgttcaggaaatatttgcccgtgtcgtagtcgtccaggatcccgaggatgttcagcagggtcgatttgcccgatcccgaggcccccatgatcgaaaccagctcgccctttccgatttcgaggtcgatgcccttgagtacatgcagcggagcgccgttgtggtaggtcttgttgatgttttcgagtacaatcatatcgagagggagtgatcccgtttttttatggtcgttgattttgttcgctgtttttgtttcggcgtatttcctgttgatccgtgaagtgttcctgccggtcgaaaccgaagggttctgcggggtgtttcctgtgccggcgttatgtaattcctcgacttttggaaacgcttgcaggcactgcgtccgttcttatcgtttgttgcgataaagatagaaagtatatttgtgaaaaacaagaaaaatttatcgaaaatcaataaaattttacccccccccgatatatcggtcgagagggggattttgtgtggaaaaaagaccgtcccatcctctgaaaaaggaggcgggacggtctttagttattccgcatacacggttattccggtttcggcaggagtcctgttttttgatataccttataatatatggatcttgcgagaaaatcacttccgcgcagagcggacaggcgtccgcgaacgattcctgcacatggagtcgaggagcctatttgagccgcaggaacgaatagccgaagcgttcgcaggcggctttttccaactcttcgcgggccgaggggtgcgcaatgtcgatcagggcgcgggcacgctcggcgagtcctttgcccagcaggtaggccgcaccgtactccgtgacgacgtattgtgtctggaaacgggtggtcaccacgccggcgccgggcgtcagcagggccttgatcttggagtgtcccttcgaggtggtcgaggggagcgcgatgaaggttttaccgccttcggagagggcgccgccgtacatgaagtcgtgttgtccgcctacgctcgagtagatcatcgtgccgatcgagtcggcgcagatctggcccgtcagatcgacctccagcgccgaattgatggccatgaccttcggattctcgcggatgcggaacgggtcgttcgtccatgccacgtccttcatgatcaggtcttcgttgtagtccatgtattcgtaaagccgcttcgagccgagagccagcgacgcgaggtttttgcccggaagcacttttttctgcgagttgtcgatcacgccgctccgaatcaggggtactaccccgtcggtgagtgcttcggtgtggagtcccaggtgtttatgatcgcccagggccgcgagtacggcgttggggatgccgcccacgccgatctggagggtcgcaccgtcgggaatcagctcggcgatgtagccgccgatcttgcggtcgatttcgttgggctgggcggtcggaagctccaccagaggttcatcgacttcgacggcggccgtgagtttcgagacgtggatcagcgcgtcgccgtaggagaacggcacgtgggggttgatctgggcgatgacgaccttcgcacattcggcggccgaaaccgcgaggtcggccgaggtgccgaaactgcaatagccctcctcgttggggcgcgaacagttcagcagcgctacgtcgatcgggatgatccccttgcggaaaagccccggaatctcacccagaaaagccgggatagcctgtccgtacccttgagcgatccagttgcggacggagttcgacacgaagaggctatatacgaggaaactgtctttgtattcgggcttgcagtagggcgcttcctcccgtccgatggcgaaagccgaatagaccttcaccccccggagttcgtgtccccggtcggccatcgctttcacgagcacttccggaatcgaaacgcttccctgaatataaacgctgtcgttggatttgatgagcttcgcagcttcagcggcagtggtgtagttgatcatgggtttggttttctatgtcgtttccggcagtcggtcggtggatggaaaattcggcaccgtcgtcggccggagacggtaggttttgtctttttttgttggttatttgaaggagccgaatttattcggctccttctcttcgtcgggtgtgaacggtcgttcccggagtccgtaccggattctttgctccggagtgcagctccgggacgatttcacagcgacccggagctgcaatgccggatttatttccgggcgtagtcctgcgcgaagtcgcggaggcgccggtcgagcaggtcgtactgctcctcgcggttcatctgcgacacgcagacacgcacgccgttctggaggctgcccgtcgaggtgagcgagatcgcgcagataccgtagcgcagcagcgcggccaccaggtcggaactcggcatcgaaccgtagcctaccgtgaagaagaatccgtcgctcacgtgttcgttctggtctttgtcatagacgatgtggaaaccgtgacgctcgaagagctccttgacgcggtgagcgcggtgtgcgtattcgcgggtgtgggccacgaagtccagcttgccgtccgccgccgctttgaacatggccgccaaagcgtattgagccgagtgacttgcgcctgacgatgcggcgtagaggaatgtcagggcgtaggattcggcgaaacggccgatgccgtagcgctccttgagagccgggtagaagcggttgcgcagtttgtccgagatcgctgcgatggcgatgcgctgaccggcgtagctgaagatcttcgagccggaaatcatcagcacgtagttgtccgtgtaacgggctgcggtggcctggaacggagctttgaacggatgtcccaactccttgcggaagtccatgcccatgtaggccaggtcttcgagaacgatcgtgtcgtacttggttgccagctcgccgatggtgcgcagctcgctctctgtgaggcagatccacgccgggttgttggggttcgagtagatgatcgccgcgacgttgccctgcttgagatagctctccagcttgggaccaagtttctcggcgcggaagtcgtagatgtcgaacgattcgtgcttgatgcccaagatgcgcacctgctggcgctgcaccgggaagcccgggtcgatgaacagaatggtgtctttcttggggtcgcactgcgagcagatctggaacaggcagaagccgccctgcatcgaaccgacggtcgggatgcagccctcgggggcgacgtcgatgtcgaggaaggccttgacgaagcgcgaagcctcgctcttgagcggggcgatgcccgtgatgctggggtagatcgaagcccgtccctgggcgagggcctgctgttcggcttcgacgccgacagtctccggcggaaggcccggaacgcccatttcgaggtgcaggaattcggtgcccgagttcttctcgagggcgccgccgacggctccgacctgacggatcgtggcctgtgcgaagttttcgatgtccatggcggcgagctgctcgtcgaacatcttctgcggaatgagagctgccattacttgcggtgtttttgtgcgtattcgtatccggcgcggaatgccttgaggttcatttcgacgatctgctcgcctttgcgggcgaagatgctgcggatgcccgcctcgaacttgtcggcgtcgagccccaggaaaggagcggcggcgcccagcagcacgatgttggccgcacggggcgaggattgctccttggcgatggcatcgacatcgatcaggatcgcatgtttgcgcttcccgagttcagccaatacggcctccggttcggggtagttgtcgatgtttacgaacggcgtggtgttggcgatcacccagccctccggattcaggtagggtacgtagcgcagcgcctccatcggttcgagcgagatgatgatatcggccgcgccctgggggattaggtcggagaggatctcgtccgaactgatgcgcaggttcgactgtacgtcgcctccgcgctggctcatgccgtgtacttctgcctgtttgatgtggagtccctccttgagggcggcggctccgatgacggtggcgatcgagaggatgccttgtcctcccacgccggaaagtatgatgtcccgtttcatggtcgtactactgtttttttgcgttgtggcgtttggcggtctggatgcactcgcggcgcgggatgatgaccgaaacccctttatattcgatctcttcgcggatcgtgcggcggatctcctccatgttcttgggcaggggtactacgacgcggatgtgttcgggttccacgcccagtccggcgcagatctgctcgaggcgtcccgtgccggccgaatcttggccgccggtcatgccggtagtgaggttgtccgagattacgacggtgatgttgcttttttcattcacggcatccagcagggcggtcatgcccgagtgggtgaaggtcgagtcgccgattacggctaccgaagggaactgtccgccgtcggcagcgcccttggccatcgtgaccgaagcacccatctctacgcaggtgtcgatcgcccggaacgggggcagcgaaccgagcgtatagcagccgatgtcgctgaagaccttgtgattggggtagtgctcgcgcagcacgtcgttcagtgccgtatagacgtcgcggtgaccgcagccctgacaaagggccgggggacggggcatggtgagctggctggccgcctcgctctcgcggcggggcagaccgagggcgccgcgtacgttgtcgggcgtgagttcgcccgtgcggggcagctcgccgctcaaacgtcctttgaccggaatcggagtacccagcagaccgcggatcatctcctctaccaggggctgtccctcttcgacgatcagcagcgaacggcattccgaagccatgcgctgtacgagtgccgtcggcagcgggtattgcgagatcttcagcacggggaaggggcagccttccgggaagttttccataatatagttgtaggccagaccgcaggcgatgatgcccatggatttgtccggtccgtcgatgtagcggttgtggcgcgaatgttcggcctcctgctcgaagagtttgttctcctcgatgagggttttgtaacgtacgcgcgagttgcccggcatgaggatccactggcggggccgctcggggtagtggagcgtgttttgctggcggggttcgccgatttcgaccacggcccgcgagtgggccatgcgggtcgtcacgcgcatcagcaccggaatctggtatttctccgagaagtcgaacgcctcgccgatcatctcgtaggcttcctgttgcgatgcgggttcgaagcagggaatcatggcgaatttggcgtagaagcgggagtcctgttcgttctgcgaggagtgcatcgagggatcgtccgccgctacgaccaccaggccgccgttggcgcccgtcatagccgaattgacgaaagcgtcggcgcagacgttcatgcccacgtgcttcatgcagaccagggcccgcttgccgacgaacgacatgccgagggccgcttccagtgcggtcttttcgttggccgaccagttgcagtggatgccgcgctcgcgcgttagggggtgcatctggataaattccgtgatctccgtagagggggttccggggtaagcgtacacgcccgaaagaccggcgttgagggctccccatgcgatagcctcgtcgccgagtaataattctttctttatcatggtgtctgttttaggttcattgctgttttgagttccgtttcccgcctcgtataaccgaacgggcttggtggttatatcctcggctctacgaaacagttcgtttttacgccgttgttttccgctttggcagagttcgaacacctccgattctgcgctcggtttatcgaaagcgttgattttctttcgactatttttcgcctcggcaatcgaaacgaaggtttcattgcgctcggcttaaggaagcaacttaggtttctgacaaatttagcgtttttttttgaaatatctactgtgacggtggtttttattccggattttcggtaatacggcaaaattgatgacgattcggaagtaaaaggtccgagctctgttttttgctttcgccggatgaagcgtgggaaaaaagcccccttcgaaaagggggcttgatgaagattccgggagaaccggttgccggtcgaatcgtgggtttgagatgcgatcggaccttcggttgccggggttgtttattgcacatcgacgaacggtccgcaataataaccgttcatttcgttggtcgcttcatagaaggccagcgcgatcttttgctttgcggtggctccgtggatggtactcttggtgttgtcaccctggttgtcgtaggttttgcctgcatatgcgatggacagtattcgtccggcatccttttcgttggcaaaggaaacgagcagaccgtccagtgcctgcggtgcggctttgatggttactacgccctccgcctgccggatttgctccaaatcggtcagaccggcctggggtgccagatagatcgtgtagtaatcgtcgctgcggcggtcgatgacggcggattggagttcgaccgggtcgttcgttccgaccgtataactgttgccggagtagtaggagtatagttcgaacgccccgtccgcatacccttcgaggtgcatatcatgaacctgcagatcgaacgagattcggtagttgtcttgcagggcgtatttgtagagggtgatggtgcccgtcgcgccttgaaggtccgtattggtgacggtaaccgacttttgttgggcaggatcgacgatttcgagttcgaacagcttgtcgatccgggtgatgtcgatcggagttttagccgtcgccagggcgttgtcgaagcggattcgaacgtagtattcatccacctggtcgatcagcgctcccatgacggggctggccggcgagagatggatttcggaaatcgtttcctcttcgagcggttggtaataggcgcttccgagcggagttttcaggtcgttgaggctgatgaagctggtccgctcggcgtcctgctggtcgtaggtgcaggtaccgtagatgcggagtttcttgccggttgcggccgaggtcatttcggcatatccttcgatcttgtccccgtcgcgggtgacgatgaagccgccgtcggtgattaatgaatggtagtcgatggtcaccatcgaaatatccgatgcgatggggtgttggaacgacatggagttgagcagcgaataccgttcggacgcactcttcatgttgatcgatttatttagctggttcggcgtgaagctgagggatatgtaatcgttttttccgccgttgccatagagcatgtcctggtagttgtcgtatccttcgagcggggagatgaagaaccagagccgatcggtttccttgtagaagaagaccgatttggcggcgatccgctggtcgccgtattcgatgaacggctcctctccggaaggtacttcgagtccgggatcctgcgtgtcgagcgttcggaatttgtattcggtagaagtgagttccagaccgccttgtgtaaaacctgttgccacgatcgtatagtcgctcgacggaagcagactgttgtatgtgaaggttttggtttcggccggatcctgaacggtcgcttgaggcgttaccgtcgcggatttgatcgtataggtataaacatctacatttttcggcgtgatggtgaaagttacggtattggcttcggccttgacgtcggaaatggtgagcgtggcgctttctccgggaggcgggggcgtcgtttcgtcgtctttacaactctggaaagttcccaatagcaggatgcaacacagtaaatggaaggttgctttactcaaagatttcatagtcggattttcctgttacaatccaaataaaattggatcaaagttttcggttaaatttgtttttatcttatttacagcgtattgcatttcttggtgaacttctcggccaaaggtcaaggcacgagagcctccgccggcctttgatcgagccggtgcggaggcacatcgtgcttaacacctttggctctctcgaaagccgagatttcagaacccgaaaaaatccttcgataaacagattttccttagcggtcagctctctgccgcatatcccttattagtttacaaaggccagaggagcagattattttaagcggacgttaacgccgcaacaactatgtagtattctctctgggaaaatccgtttaccggaagggtttctctatgacacgatactattgacatattcggtctgatgtttcagcacaaagaatagacggtttaccagtttgcgggcgacctttacgatagctttgctcttgggcatccgtttgcattgttccgtatagaacaggttcatcgcagggtcttgacgtaccgccacccatgccgcttctatcaggttacagcgcataacggcgtgttttcgtatggtaatatcccccgtcccatctttctctccgctggagtggcacatcgggatcattccgatataggcagccagttgttcggcattgcggaagcgggttatgtcgcatatctcggagaggaacgccattcccgtagcctgcccgaaccccggaacgctcataatcaaccgcagcggttcgcggaatcgatccgtcttggccaatgtccgtaaagcccgtgtcatctccagtttctgacggcgtaactcttccagatgccggatatgaatgtcgagggcctgacggccgctcggggtgagcgtctctatctccttcaaccaggcgaaaaagcgcttcgaccagttggaaaacggagtgagaaactcctgcggaatctcgatgcctaaataccgaagttgagacttgagccgattcttctgacgggtcgtgtctttggttatcgagttcttcaatcttatcaaggaacgcatctccaacgatacgctgtccggcgtataaatgcctttcagctcgttggctcttaaactccgcgccagcttaccgctgtccacggtgtcggtcttacgcagcttttcgctgctcttggtcggcacgtcggccggattgaccacgatgttgtcgatccctaaggccgtcagacgctcgtgtatccaaaatccgcagaagcccgcttcgtacaccgagtgatactcggcgcccggataactccgagttaaaaatccgtacaacgcttctgggctcggatgctggctaaacttcttcaatacggaggtttcggacaagaccgtaaccgaccaactcttcaaatggacgtcgattcctacataaatcttttgtcctctgaaactaattttgtttctttgctctctcatggctatcgtcgttttagttagtaaaggttttgcagctttaatctaaccaaaatctcgatagctttttcatttatccgctatcatcgcggcttaccctgattgtaaacatagggattattttagggttgtttttttgataatttatgtgctcgatgttccggttgtgcctttgccgctgaaagcgacgtgttccaaccggctctcccttcgtcacggggaccccgtgcagcgaggtttcggacaggttgggagttctgcgtgtttgtttatttgattgctttttatttggcgctcgtggtcaataattccgaagtgaccggagccgacattttcccgttgttatcgaccgggatgaggaccagatagctttctgcgaaatagtagtcggtggagaacgtcgtgtcttcggtggcggcacggtattttacgccgttttgtttgcagatcgtttcaccgagattggctgctgcatcgtaggctgttttttcgatcattgcgtaatagtaacctgcgcaatcggctccgggggttacggttaccgaggcatagaaagatacgccgtaattgtccgtgatcgaatttaccgcgatggtcgccgtcgcagagccggtagcttcgtagccgagggtttcgaactcgaccaccgtcggaacgccgtatctgtcttcgttgtcggcttcgggcagggcgatcagtacgtattgcgtatcgtatgccaaacgggatccgttgatgtcgttgtcgctgtatagcgttatcggataaccactctctttgccgatcaactctcgttgaacgtatgtatccgcattgccgccgtatttgcggtcgaaatcggctttggtgatgaagttgtaataagctttttcgaagccgttccgtttgacggagaaagtcgctgaggtgaacgatgcggtcttcagggcaatatcgaccgtgagcgacgtatcgtagtcggtgcctgcggcttccgtgtggaactccttgtattgcaggggacccaacttgccttcggcatcgtatgcgaacgagaagaagtaatattcgctgcccggcgaaagccggtctgttttccaggtgccttggaagtcggccgtgatgtcgtagtcataggtcttcgcatccagtccggcctggacgaattgttccggggtgcctgcggcttcgacgtcggacttggtcgcatagccggcatagtaggaaacgacgccgtcctgttttgtcagggcgatctccaactctttgcccgcaacctgcggttcgcccagcgtgacagcggcctgtcctgctccgagttcgtcgcgggcggggatcgtcagcggaatttcgatgatttcgccgtagtcttcacagacgacatcgaccccttgccggacaacgggagcggcgtagagaaggacttgctgcgaccgggtcgaaagcagggttttgttccactcttcgaacgaggcggttttgaggcccgctgtcagtgaggcgacttcgaggtaatggatgaactgctcccgggaatcgaccttgaaatgctcttcgaaatcggcgctggattccgtaaggtccgggtcgaaaattttcaggaaatagagcgggaatttgccggtgtccacgtcggccttgagatagattccgtgtgcggtcgccacggcgtcgatccgtgcgaatgcggtataggcgggggtcgtgaacgaatgcgtggcgggttcggacggttcgtctttgccgttataggctacgactgtcaatacgtagtcggtttccgcctggaggctgccgaccaggaaggtcgattgctgtggcttttcgacgacggtcatttcggctgttccgtcggggacatcgaccttgtaggcgatccggaccgcattgtcgagtttcagggtgaagcggatcgaactgtgggtcgtagcgacctcttcgatcgaaacgacggcggggccggtcggaagggcttcggttttgaatgcgtgggtgacgggatcggcggcctgcccgttttcgtcatatgcgacggcggtgatttgatagtcggtcgccgcctccaggttgtcggttgtataggtgccgccttcggagccgtttacgaacgtaagttcggccgttccgtcgggaacatcgaccttgtagccgaagcgggctgcattggcggttttcagggtaaaggttaccgaattataggtggctttcacctcttcgatggagatggttgccttgtcgggatccggcgtggtcggtttttcgggggtcgtgaatgttgcggtggccggattcgaagggcgctggtcggcgttataggcgatcgccgtcagcttataagaggtttcgggggtcaggtcggttatttcgaccgttttttcttcggagctttctatcgaaacgaaatcggcgtcatctccccccccctcgatctcgatcttgtaagccatcgagatagcattggtcggaattaatcgaaaagaaacgttgtctgcttccggggagagctctgcgatttcgatggttgcaggaggagcttccgtcgaagtgttgtcatcgctgcacgcagcgagtacggtgagtaaagttaatccagttaggagaaacttcagttgggcgaaattcaacataacatgatttttaagttagtaaaagaggagcgcactattacaaatataataaaaagaattgattttgcaaattttaccgatttgttaaattgtatattttaatatttgaattgtaaaatctgtggtctattcgtaaaattttataaattcgaaaagaaggcgagttcgatttttttcgggattgtgtatttagatcgattgaacccggaatcgcattgtgcttgttgagtaagtaccttggattgcataaaataaatggcaggaagggtgagggggcacattgtcgagttgccgttggagaggggcttcgtgcttcttttgggaagaatttggatgttttggcgattcgttttcaggtgcttttcgctgacgggaatctcaaagttgttgctatgatcgggcgtcggtacggacggattccgtatggattttatgggaggacggaaattttcccgggtgtaagtcggcgggagtacaaggcggagaaagagagaatcggcaactgcgctatggtcgtgcagccgaaaacaaaaagcgacctgtcgaaaaacaggtcgctgcattattttgtgacgccgacaggactcaaacctgtaaccttctgatccgtaggcgtaatttcggggtttttgctattttttggtaatttcttgtttgttttataaatagctgtatttcagtggcaaatatagctattttgttttactctgtttttgtttagtttgattaaatacgtatatttgtgtcgaaattgtgtgtctaaaaaatgaatttacccacaaaatgaactattcaaaagacggaataacggttgcgcccgtaatagatacgagccacccgaaaaagagcgggaaatacccagtaaaaattcgcgtaacctaccgccgggatcgccgctactatcctacgggcaaagacctgaccccggaagagtgggagatgcttggagcgacaaaggcgcgtgcccttgtagcggtccggaaagacatagagagcagctaccagatagtgcgagcagccgttgaggatttagcgggtaacggcgggttttcgctggatgccctcaacgatcgactgaagggggcagcgtccaatacggtaaacgcgatgttccgggccaaaatcgccgagctggaaaaggccgggcgcgttggcagtatgctagtttatgacaatgtgctgaaagggctggagcggtttgccggggagcgcatacagtttgacgccgttaccgtatcgtggctgaaacgatatgcagattttctgggcaaagaggggaaggtgcaaacaaccatatcgatacacttgcgccacctgcgggcggtgctgaacgatgcccgacgtctgggtatcgtcaaggaaacgcaatacccgttcggacggggccggtatgaaatacaggaaggcgaggggcgcaagctggctctgacgctggagcagatcgggcggatcgcccgctatgaggacgggagcgaagcgacggccaaataccgggattattggcttttcctctacttgtgtaacgggatcaacgtcgccgacttcgtgaaattgcggtaccgtgatattgtggacggtgaaatctgtttcgtgcgtcaaaagaccgagcacacgaccaagacccgcaaggaaatccgggtagtggtcgttccccaaatgcaggctattatcgaccgctggggcaatcccctggggcgtaataactttatatttccggttctcgacgggacggaggacgcgatgcaccagaagttgaaaacgatgtatttgacccgtgcgatcaacaagcggatgcaggaagtaggggagcagctcggaatagggaacatatcgacctatacggcgcgtcattcgttcgctacggtgttgaagcgtgccggggcgaatatcgcctatatatcggaaagcctcggccaccaagacctcaaaacgaccgagaattatttggccagcttcgaacgggaagaaagggagaaaaacgcggctattttgattcctgacggctggaaataaccgcctgtaaacagccgtatttttcgcgggttcaattgtttgccttacgattttataaacggagattaaaaaatattctccgtttattttttttatttattttttgtaatgtaaaatacttttacacagcaaattgataatttgtaacgacttgcgggaaataatgttaaaaaagtgaaatttccctttgaatattaccgaggtaaagcgatttttgcagcaaataaaagcaaataattttatcgtattatattatggagacaaacttggtagtagttgaacaggagaccctgaaagacttgatttcggatgcagtatttgccgcaatgcaggattacaaaagacgtgagaaagccacagagagtatcgcggatgcttcggagttgcccgatgcgatgaccgccgaagaaactctgccattcctggcttcgctgggttatcggacgactatgcgcagtttgtatattcttacccatagacacgaaattccctatgctaaattcggcccccgtcgtttggtgttctcccggaaggagctgcgtgaatgggcggcgcagcagataaacaggccccggaaccgggatgcggaagccgctcaacgtattgcagaaagtgctaaccgtaaataatcttatcgggtatggtacagaatcaaaacgcccccggcactcgaagcgagcacgcaggggcaaaaactaataccataggggctaatgacactacaaatgtaaggtttacctctgtattttcctatcaccagcaaaggatttataacttgctttcggacggtattccccgttcggcggccgatattactattttgttgaggctatccgatccccgcagcgtaatccgcgatttgcggcataagggcgtatcgatcgccgacgaatggtgcgagggcgtgcacgggggccgattcaaacggtattttattcggaaaggagggatgcaataatgacaaatacgcaacagaaagaaaagcctaattttttgtattacacagattgggcggagcagctattgtcgtttccggcggatttgcggcttaaaatcgacgatgcggtaaaacgatacgtactatacggcgaagagccgaccgatagagatgttttgtactctatgttcggacttatgcgggctcaaatagaccgcgacagggccaaatatgcggatgtatgcaataaaaattccgaaaatgcgaacaaacgttggaaaaacgagcgtatgcggtcgcatacaaacggatgcaatcgtatgcgctcgaatgcggtggatgccgataatgataatgataatgacaatgataaggatatagataagaaactctctaacgagagtaaagaaagtgcggacaagccgcacaaggccgcaagcaaacgcacggcgtttgttgctccgtcgctcgaagagctacgtgtgtttgtttccgaacaaaaactgacgaacgtaaatcccgatgagtttatcgaccactacacggctaacggatggcgggcaggtagaaacccgatgaaagactggaaagccgctgcgcgtaattggaaccgccgcacccccgaatttaatacccctaaacccacacagcaaaatgaaaacaaattacagctcgaactgctacgataacgcctcacttggggctgacttgaggatcccggaatcgcccgaactcgaacgggccgtattgggtgcgctgctgcttgaaccgcaatacgtcgccgatgtgcggggtattcttacctcaacggcattttatgatccccaaaatgcgaggatttacgatgttatttgcaaactcgatgaccggggaataaatacagacctggttacagttacgccggaagtgagaaaggcgggtatttctccggattatcttgccgatcttacggcggccgtcggatcgggtaccgaggtactgaaccacgcccggagattggtagagtttgatatgcggcgccggttgttcttctttggggcggaacttaaagccaaagcccagaccgaccctaatgcgttggattgggcaatgtcgggtattgaacggattaccggcgatgtcgcccggatcgcttcggcccgaagtatcggcgatgtgatgcaggatacgctgaccgacctggaacgtcgccagcaggcccaccagcggggcgaatgcgtgggaatatctaccggtttgtcctatatggaccgtattacgggcggttggcggggcggtcagctggttatccttgccgcacgtccggcgatgggtaaaacggccgttgcgcttcatttcgcacaagccgcagccggggccggtgttccggtgtgtatcttttcgctggagatgcccgcgacgcagctcggcggccgtatgctggtgggggcttcgggggtagatgcgagggcgttccggtcgggtgcggtaagtaccgaggattggcagcgcatagaaccgggtgcggtccggttgggcgagttgcccgtgacgataatcgataccccctctatttcgatgcccgctatccgggcgcagtgccgggcattgcaacggcaggggcggtgtggtatggtcgttatcgactatttgcagctgacggcccccgattccgacaaacgcaacaaccgcgagcgggaagtagccgagatgagccgggcggccaaagtgctggcaaaggaactcgacgtgccggtcattttgttgtcccagctttcccgcgaggctgaaaaagacgccaaaccacaactgtcacaccttcgggaatcgggagcgatcgaacaggatgccgatatggtgatttttatcgaccgtccggccatacggaaagaggaaacgataaaagatcccgaactcggagagatttcgaccaaagggataggcgtgttttatgtcctcaaaaacagggaaggcgctacgggaagtattctgtttcgccacaacgaaagcctgacccggataacggactacgatacgacaccctcaacttcgaccgacggacaaaatggcccgttctgaaaatagccgattttacggctttttcctgccaggtggatcaactataccaaaacgcaaagaaaatcgaaatttcataaacactccatgaaaaaacagacattttacccgcctttgcgggatgagtttacgaagttcggcgataagtttgtgaaaatcgcccataacgaggcaaacgggatgtactgttacaagcgcaccacatccgacgccctgacctattacgaagtgttcaaggcacccgaagccaaagaccgggacggaaacaaatacgaacgctatccgagttcttcagatttcggtttcggtgtggccctttgtattcggggtgatgagaagcacaccgccgacaaaatagcgttctatatggctaacggattcgccgtcgggcgttaccgcgtcgcggggtaaatgtaacttgcgggcgtcggtaaatcgaacgccctatgcctttgcccccgtatcttgcgccacaatggacaccggaagaaatcgcccggctcggtgagctgtaccccgatcacagtaacgaggagatagccgcaataatgggccgcaccccggcaagcgtcaaagtgcgggcagtctggaacgggttccgcaaatcaccggcttacaagtacagggtcaaatcaggaccccggccccgcaagcaggtcggatgtattccgaaccccttgccggttattgaacggttattaagaaaacacggttacaaatagcaaacaaaggacggacggagttaccccgcccgtctttcgtttttactgttttactgtcagaaagccaaagccccggaaaaacccgattttttacccccgcgcgcaaatcgcgatcccgtttcctgaaaacgttttccaaaaattgccaaaaaatgccggtccgaaaatatagcgaacattagatacggccgagggggtgggggctgtttaccccggaattgccctgttatctgcctctgatgcgttatctgctgttgggtagtataatctatccactcaaataaataagcggccaaatagccgcctttgtgtgcgtcgccggttcgatgtgcagcaaccccaaaatataacacttgatttgtccctatcatttaatgtagcattattaagagcattaaaaaactactacatttcaatacattattgagaagtagtatataaggatattttaatgtagcctataagcattataaatattacttatagaagcattacaagcattatataatacattaaatactacattaaataaagttctcggatgtattaaagtgtttgtttatatgaatacacatatatcactgtatttcaatgtgatatatgtatttgtatttgattgctttcgggtgcttgtgtacgggtgatgccgttttggatggggtggatagtaacaaccccacagcctcaacgaccggagccgggcaaagtgcctgcaatccccttttttgattttacggtttttcttcgtgcggctgatactttctatgtccggcgggagaaacgccgtcaaatgcaaagccaatatgaaatacgggcatttatcatcgaagggtgcagcgggttattttttgccatcggtgcgtttgaaccctatcggctggccgaccttgcgagcctgcggcaccttgatcgatagcgccgcgatagcctgataaatgttgtcaagctctttgcgcatatcttccgaaagatcgtttaccgcttcggcattgtcttcgtcagcacgttccaacaatgccagctttgcccgtatttcggacagttccgccgttatctgcgtcgtcgtggtaatgtagttccgcatcgccacgaaagcccgcataatggctatatttgcatttattgcaatgtcgctattgagcaagccggaaagcattgctaccccttgctcggtaaaggcatacggcattttgcgaataccaccccaacctgatgtcacaatttgtgatttcaagtttgcaaattcctgatttgtaagctggaacataaaatcgggcgggaaccgtttactattccgttttacagcctgattgagggcacttgttgtcacttggtacaactccgccaaatccctatccagcatcacccgctggccccgtatctcgtaaatcttactttggataggttgcagttccataacagtacaatattatttcttgagagcctttttagcattcaacgggctaacaactttttggccggtctgggcctcaagttctttccgagcagcaccggcaaccttgccgccccggtgtgcaatttgcttgctatgctcaaatgtttcgggctcttccttttgtgaaatctcggttgttgaggcttctgcaagcatatttagtactaattcgaggttagtcatgttatcccgcaggctctcggttttaagccctttatattgcttgtactgctttgttgatagaccagaccaaccctgtgtaatgacatcggtaaggatcgcgtattgccgacctttttgtattccgcggcgttcccattcatcggtaagctctttgcgtacctcgatggatttaagcctttgatttatccagttggccgaatagcctttgctgtggtaatactccattaggcgctcaataccttgctctggatcatcgatttcttccagccgttcccggcctaattgcgctaaccattgtttgaacggttccgcctttggtgatgggatggattgtatcagccggaatagttgttcgacatcggccacatcggtgttgtagcttttcccgtccgaggacttcattttgagttgtacgatattttcgtacaactgacttccctcggcctgtagcttgcgtttgaggtcgctccagtatcggcgggggtttgcgctatctgttaatacctcgataacgtcaataatggagatataccactttttggcctcggaatcccacacggaacgtacctgcctatcctcaaatagttttatcgcatctttctgtgtcataaccttaccccctttccttgacttccagcaccgtcccgcatttcgggcaggtgatcgtgttcgatggctgcggggcgaaaaaatcccccacgctgcaaccaatagcagcggcaatacgttcgagcacctgtaccgaggggttcccgttgatgtgattacttaacccttcgcgcgtgatgcccattctttcggctacctccttaacggttagtccgttagccttgattacttttttaatatccataatgtaacggtataagttcacgctacaaatgtaatcaaattccccgaacgtaatgcgatagctataacaaaaatatatttcgtgaagcaaaaagcttacaaaatatttgtaagtgtgaatttattgcattacatttgtgtcagaaataagaaccaatagcattacaaacaatgacaccgactgcttacaatcaattcgcaaaggagatcgccaactacatcaactaccactgtgacggagtggatgagggcttcgaaatcgagtacgagggattcacggcttttgtgagctacaaggccgaaatcagagaggatgccggggactactggacggctccgagctggacaatagagaaagagagtacgacggtagcggccgtatgggatgaacaagggaacgaatacccggaaattgcagaggctttgcaagtgctgttaaactaacgaagggaaccggggcggcctcaaccaccgccccgacccgaaacaaggaagaacgaacaaccaaaaaccaatacagacaatgaaaagaaacgatttgcaaacgattatgcgccgggcgtggacgattgcccggacaacgggcaaggccttcaatatctgccttgtcaaggcttggagcctttaccgcctgacgcagcgtatgcgggcgggtgtcgttcggttcgcctatgagaaagccgacgggacattacgcagggcggcgggtacgttgcacgaagtggcggccacgatcaagggcaccggccgaccggatgacgggtgcacggtcaagtattacgacgtcgaggccggcggctggcgctcgttcaaggtagagaatttcgtaacggtttactaacataatgcactgaaacaatgaaagacgaaacaacaatcacgctccccgtatccaaccgggcggggatcgtaaccgtcgaggacctgttagcggagatcgggcggcggttcaatacggagaaagatttgaaaaatgcggctttcgcttttttggtcgatcgggggctgtatctggagttccataactgtttgcacgatccaacgatcaacaaagggacgacaatagacgaacgtgttaaaatgggagaaaaactttataagcaatgacagtagaggatttgaaaggggtgaagctctcacaggtgaccgccggatatttgggcatatatatcgtattggtagaattgcacgagatggccgacagatttaccagtatggaatacggcagggaggccgacgatataaacgaggatttctatagatccctgatgaaagcgcaggatgaaataatgaaattatgtaatcagtcgataacaggcaagttgcagctattaagaaaccatacggaaatatgatgctttacgagctttcggcggacggccaaacggtgggagtgtttcccaccgaggccgcagcctggcacaatgccgcgtatatgccgggcgggtgctacactatccgcgaatggaccaaagacggcgaattttggacgtttgacccctcaaccaacaaatactatgacctcaagaaatgacacgcaaataaaggaagcaagggcgcaatacgaccgggcacgggtacgggtgcaggaagcacggaggcccggcgaacgccgatactggagcaacaaacagaaagaggcggaacgccggatattgtccgaattgcgggcgcgtattttgcggatcgccccggatgtaaccggcggcaattagacgcaagttgtgtgtaaattgtgtgtacgaccaaaaacagaccagccacctacaacgctgtaagtggctggttttcagtgtgacgccgacaggactcaaacctgtaaccttctgatccgtagtcagatgctctattcaattaagctacggcgccgaattgcgaatgcaaatgtagtgtgaaaattgctcttatgcaaataatttgtcgtaaaatttaccagtctttttattttatatcttggtaagaggggtaattttgaatataatacattgataatgtttgatttgaggtaatctgtgctttgttcggattcttttccgggagtttgtcggtggaaatatcgttgccgggaaaagagggcatttgtcgtgtccgactggctatggggaccggagatttgtcatacaaaaattacccctgcgggctgaaatccgcaggggtaattcgatgattttgccggatgcgcttatttgaccagttcggcgagcttctccttgattccttcgcctcgcaggtctttggcgacgatcttgccttcgggcgagatcaggaagttggtcgggatgctgcggattccgtactcttcgacgatcggggcgctcttgccgtcggtgacggcgattacgttgggccacgtcatctcctcttttacaaggaattctttccaactctcggcatcgttgtcgagcgatacgccgtaaatgttgaatcctttggggccgaactccttgaacgcctccttcagatagggcaattcgccgcggcagggactgcaccaggttgcccagaagtcgatcagcacccatttgccggggccgatgaggggtgtcaccgaaacggtttcgcccagggagtcgggcagcgcgatttccagatagggcttgccgatttcggtattttcctgggcggcgatcgatttggcgatggcggtcaggatctgggttttctgcatctgttcggggaatttattcaggatttcgcgggcttcttgcggttccatttcgttatagaggtttccgaagaagtaaacgccgaccaggttgtcggagttgttgtccaaagcgcggcgcatgatgccgttggctacctggttcagcgaatcgaatttctccatgtcgttttcttgcatggccaccaggaattgtccctgaagcatgcccaaagagtcgtttatcggctggaaaatctcgttcgagcgggtgccgccgacttggaattggcccagatccgcagttttaacgtcgatttttcccggttcgaggaagatgaatccgatgccctggcggtgccggttggtaaggatggccaggtccggctggtcgatcgtgcctttgattttgaacgtaccgtccgcagcgacggctgccgatgcgatggtcggattttcgggattgccttgcatcaggaatacggagtccgtgattcccgggtccagtttgccggtgatggtgtaggtattgcctccgcatcccacgagggtgcctgcggcaagaagacctattaacgcttttttcatagtgctgagaaaggattaaaatgattatttggtcggtttgtgattcgtcttttggggtgttcgcggcgtttgccggatttcgcgctggggattatccttcaaaaaccgttcccagctcgaactgccctttgccgaggcagccttgcggcctccgccgagtcctttgaaccgatcttcgccgagggcgccgttcaatgggttcgaactcatgaaatggtggcacagggcgacggccataccgtccgtagcgtccagtcgccggggcggacgttcgatcgtgagcatgctgctgacgagagccgcgacctgctccttgggggccgagcctcggcccgtgatacactgtttgatgcgtgtgggggcgtattcgaatacctgcagtccgcggctcaacgccgcagccatcgccacgccttgcgcccggcccagcttgagcatcgactgcacgttctcgccgaagaagggcgattcgagagccacctcgcgggggcggtattcgtccacgagggcaccgacccgctcgaaaatgtagcgcagcttttcgtaaggatcgttcatcctgtgcaggtcgatgtcgcccagcacgaccgatcggacctcccgtccgcaaacctccagcaccccgtaccccatgtagttggtgccggggtcgatgcccatgatgcggtatgtcgtcgggtcggacacggtgcagggacgttacttctccttgagggccgcgatctccttttccgcctgactcacgcggcgtgccaggtcgggcaggttcttgaagatggccgatgcgcggtgatattgcatgccgggcagcgccggatagccgaaacgtacttctccgtcaggtacgtctttgtcgagaccgcttttggagccgatgcagaccctgtcgccgatggtcacgtggtccgcgatgccgacctgtcccgcgaggaaacagttgtgccccaccttcgaagtgcctgcgatgcctgtctgggccgaggaaacggtattctcgccgatttgcacgttgtggccgatctggatcaggttgtcgagtttcacgccccggcggatgatcgtcgagtcggtcttggcccggtcgatgcaggtgttggcgccgatttccacgtcgtcttcgacgacgacgttgcccagttgcggaatcttgtcgaagccgcctgcggcattgggaatgaagccgaagccgtcggcgccgatcaccgcacccgcatgcaggatgcagcggctgccgatcacgcacccctcgtaaatcttgacacccgggtagaggatcgttccgtcgccgacggtcacgccgtcaccgatatagacctggggatagatttggcagtcggcgccgatgcgggctcccgcctcgataacggcgaaatcgcccacgtaacaatcttcgcccagtgtcgcccgctccgagatcgaagcccgctcgctgatgccctgtttgcggggttttgcggcctgatacatttgcagcagtttgagcactgcggcgccggtgtcttcgactttaatcaaggtggcggtcacgggttccgaaggggtgaaatccttgttcaccaatacgatcgacgcacgggttttgtaaaggtgtttttcgtatttggggttggtcaggtaggtcagggcgccgggttcgccctcttcgatcgaggagacggtgtgcaccttggcctctttgtcgcctgcgacttggccgccgagaaaaccggcgatcatttctgcggtaaattccatcatagcaatatagtaatcagaggtatttttttatgtctattccttcgggcatgaattcatcgaccgtgcggccgaaagccagtacttcgcgtacggtgctcgaggcgatgtcggctacgggagccggggtgaagagcatcacggtgatgatgtcgggatgcaggcggtggttggtcgcctccatcgtccgttcgtattcgaaatcggtggtgttgcgcacgccgcggatgatggccgaggcatgctggtcgcgggcgaagtcgcccgtcagaccggtgtagattctcacttcgacccgggggttgtccgcatagaggtcttcgatgagttgtttgcgggcttcgatgcgcagcagtcctgccttggaaacattgttgccgatgccgatgacgaccttgtcgaagattcgcagggcatcgtccacgagtgcctgatggccccgggtaaagggatcgaacgatcccggaaaaatggcgatggtgtgtgacattgggagcaaaggtaatgaaaatgaatacagaatccaacaaacggatccgggggtgtcgccgaatgtatccgactttctgcaaaagtagtgaaaatgagtgcagaatgaaacgagcgaactgttttttatgccgagtgtattccgatcttttgtaaaggtattgcaaatagggtgggacaaaggaaacctgtccggtttgtatcgggcaggatgcgttagtataatttgttcaggacgcgggcgatacgttcgacgatgattgcggcgtagagttgcccttcgcaggccgatagcgaggtgaggccccggtgatcgacatagaaaatttcgtcgaaacgggcgagttgctcccggccgatctccagttccagcaggggcaggcgggcggtttcgacggcccggcatgccaattcccgttcgacactcggcggggcgggcggagtatagacttttttccctttcacggcgaacaggggcgcttcgtcgcatacgtgcacgaatctctcgtcgtcgcagcggatcaccgcttgtacgtctgtccggactgccgcccgttcaatgtccgcttccgccgcccggttgtccgccgtcaccgctgcctgcaaagccagcatgcaggctgcctcgcgtgctgaggtggggtattcggggtagggaacgccgtagttcacgacagccgcagcgggccgcagcgaccgcagggcatacccgtcgtagagggataccgctccggggatcagcagcaggtcgcccgccggtgtgaaggccatgcgtacgaacgaagagcctgcgacggggtgacggttggcgtcgagcagggcggcgatctctgcctccagccggcgaaggtcgggggcccagcgcaacccgaaaagctcttgtatgttgcgagccagcagttccgtgtggcggtcgagccagagggggcggcgtccccggacatgaagcgtctgatagaggtatgtgccttcgatgcggggcatcggctccgggataccgttgcgcagcaggatgcgttccattattggaggaagattttgagaagcagctcgcggagcagctccccgtccggggcgccgcccgcgttcatgcccttcgatttggcgtcgtattcgcgcagcagccccaggatgcggaacacccggcggttgtcccaccgtgccgaggtctgcttcagttcgcccagagcgtaggcgttgttcattcgcaggatgcccatgagttccgtgtccgagggaaacggaactcccttgtggcggctgagccaccgcaggtagttgatgcggaaaatttcgcggaactgattgaaaagggccagaatcgttaccagcagggggttgtctttggggttgcgggcgaaatggtcggcgatgcgcagggcctgttcgaggttctgtcccgtgacggccttgcagagttcgaagttattgaaatccttcgagatgccgatgttctgttcgatgtgtgcatcggtgattttcttcgttccttccggcagcgagagcagcagcttgcccagttcgttggagattttggcgaggtcggtacccaggtggtcggtcagcatcgcctgggctttcgcgtcgatcgtgcagcctttcgaggcgacgaactgcgcgagccaggggccgatctcgtagtcgcgcggccggaccgattcgagcaccgcaccatgctgggcgatgcttttgtagagctgcgaacgcttgtccacgttcttctccttgtggcagacgatcaggatcgtcgtgggcgagggtttcgaagtgtatagcgagagtttgtcgaggccgcgcagttgctgcgcctccttgagaatcactacctggtacgaacccatcatcggcatctgccggcagaggttcaccacctgtcccgcgtcggagtcccgcccatagacggtcagctggttgaaagcccgttcggactcctggaggatcgtcgaggccagcaggtcgcagagagcgtcgatgaagaaggcctcctcgcccatgagcagatagacgggcgcgaacttccgcgccgtgatttcgccacggagacggtcgtaggccgctaccgtatctttgaatttaacgccgcttttcgccatggcttaaatgatctctttggtgatgcgcagcacgttttcggtctcggccgtgagccggtagcggtcgtcgatgcgccgcccgacgagccagacgatctcgtccccggaaagcagtacgaactgccgcaccttctccggcagcgggactttatggtcgatcaggtagtcgctgaccttcttgcggccggacatgccgtagggaatgaaccagtctccctcctgccagcggcgcaccgtgagcgggtatttgagtttgtcggcatccacctgggcgatgtgttcgggtacgccgaagccctggatatcgtcgatgtcgcgcagctcgaagtagagcaccgagttgccgcagtagcagcgcggggcgcccgcctcgacctgcacctggcaggggtcgtccgccgggatcggggttaccataatccgtccccggtcgatgtatgccacgtgggatttggagtagaaccgcttgcccgtgccggagttctgctccagcgccctgaccaaggcgtccgacacgtcgcctttgaacgaataggtcgagttgagcagttcgaagattacgaaattcagcgggaaagcccggtcgatacggtcgatgtggatcgtgtcgatcccgttttcggtggtgatgacctcttcgcggatgcgctggatgccgtggttgatgaagagctgcgcgtcggtcagacggccgatgttctgacgcatcaggtcggtgaacttggggctgatctccttgatgcggggtacgagtcccaggcggatcttgttgcgcaggtatttggtcgagcggttcgacgaatcttcccggtaggggatgtgctgcgctacggcgtattcgaggatgtccttgcgcgaagcgaacatcagcgggcggatcagcttcccggcatgggtggtgatccccgtcagaccccgcaggccggtgccgcgcaacaggttgatgaagaaggtttcgatcgagtcgtcgatgtggtgggcgatggctactaccgtgtaaccgtgctcgcggctcaattcgtcgaaccaggcgtagcgcagccgccgtgcggccatttccatcgattcgcccgtgcgctccatctcgcctttggtatcgaagcgtttgttgtaccagggcacgccgtacttctccgcctcgcgtcgtacgagctcctcgtcctcttcgctctccacgccccgcaactggaaattgcagtgggccacgccgacgcgatagccgcttcgcacgaagagcgagagcatgaccatcgagtccacgccgcccgaaacggtcagcaggatgaaatcctccggagcggccagctcgttgcggcggatgtagcgttggaaattgtccagtaggttcataggcagtgccttgtcggttttataatatattgacttcgggttcgatctccacgccgaagcgtttctttacctgttcctgcactttgcgggcgaaagcgacgatctccgtacccgtagcgcctccgaggttgataatcaccagcgcctgccgggggtggatccccacgcgtccttcgctgtgccccttcagaccggcgcggtcgatcagccagcctgcggccagcttgacttgcgaagggtcggctgccggatagtgcggcatgtcgggatagagtgccgacaagcgttcggcctcctcgcggccgacgaccggattcttgaagaagctcccggcgttgcccgtcaccgcagggtcgggcagcttggcccggcggatcgcacagacggcctcgcggatgttgcgcagcgtgatgcctccccgcgcttcgacctctgcggccaggtccccgtattcgaggcggggtcggggcgtgcggctcaacgcaaagcggaccgaagtgatgattacacgtccccgcagggagcgtttgaagacgctgtcccggtacccgaacgcgcagtgttctctgttcaggacgagcgtgttgaggctctccgtgcagaacatctcgacgctccggatcgcatccttggcctcgcagccgtaagccccgatgttctggacgggtgcggccccgactttgccggggatgagcgcgagattctccaatccccacagttcgtgctgcacggcccattcgaccagggcgtcccactcgacgcccgcgtcggcttcgaccgtcacgcagtccggctgttcgtccacgatgcggataccttgtgccacaggggtcagcagtgtgccgggatagtcctgcgtgaagaggacgttgttgcctccgccgaggacgtaccacggatcaggcatccctttctcgaaaagtttctgcaaatcttccgtccggtcgaactcgatgaggcgtgccgctcgttgcgccacgtgaaaactattgcgcggtgcgagttcgggattgttaaattctcgtatcatatttgcaaagttaggaattatttcgttaatttgaatgttttcgacaagcgagggcagaacgacttcactcgttctgccgggtggagaaaacagagagtgcagttcgatgtttccgatgagcgaggcaggagaggacggcttttttgcccggcggagagaaaggggcccgcaattcgccgttttcggtcgagtgatgcggggcgttgtgtcgggcaaggagaacgatcgttcaacggtttcgatctatgcgagtgagaagggagctttttgtaacaggcgggtagggcgccgtgtgcgtgaagagaaaaacgggcggagtcgctgttttttatcgcccgcttcgtcgggcgtcggtcgatgtggcgccgatcttgctgaaagagaatgaatgtgactgataaacggtttccgatatgtttacgaaagaggattttgtgcaaatggaggagcacggcctgacgccggcggctctcgaaacccagttgaagaattttcgggagggttttccctttcttcccgtgacgcgggccgcttcgtgcggcgacggtattcgggtgctggatgctgccgggatcgagcaggcggcggcccgttacgaccgtgcgaaggagtctttgcgggtggtgaaattcgtgcccgcttcgggcgccgcgacccgtatgttcaaggatttgttcgagttcgtccgcgaggggcgccgtacggctgtagtcggggagttgctggccaaccgccgccgcttcgccttctggcccgagctgcggacgatcgtcggtgacgatgccgacgagctgcggacggtcgaaaatatcgtcgccgaagggctccgttacggggaaaccccgaagggactggtgtcgttccaccgctatggggatgaggtgcgcaaagccgtcgaagagcatctggtcgaaggggcgcagtacgccgccgccgggggcgaggtgaagattcactttaccgtctcgcccgagcatctgacccgtttcgaagcgttgctggccgaaaagataccgggttacgaatcccgtttcggggtcaagtatcgcatctccttctccgtgcaggacccttcgaccgacacgctggccgtgaatcccgactgtacgcctttccgacgggcagacgggcggctgctcttccgtcctgcgggacacggggcgctgatcgggaacctcggaaagatcgatgcggacatagtcttcgttaaaaatatcgacaatgttactaccgatgcccggcggggcgatacggtgctttataaaaaagcgctggccggagtgttgctcgcattgcaggagcggatttttgaatacctcatggccctcgaagtgccgggtgccgagttggagcccatcgccgcgttcatcgagaatgaactctgcgtgaaactgcccaaggattacggcacggctcttttgaggcaggtgctcgaccgcccgatccgggtgtgcggcatggtgcgcaacgaaggcgaaccgggcggcggccccttctgggtgaccggggccgacgggttggagacgctccagatcgccgaatcgaaccagatcgctcccgaaaagcgggaattgatgcgcttggcaacccatttcaatccggtggatctggtttgcagcttccgtacctcgaaaggaggtcgtttcgatctgcaggagttcgtcgatcccgctacgggttttatctcccgcaagtcggacggcggacgcgagttgctcgcgcaggaactgcccggtctttggaacggtgccatggcccggtggaatacggtcttcgtcgaagtccccatcacgactttttcgcccgtaaaggtagtcaccgatctgctgcgtcccgaacatcagggcgatgaattttgaataagccattgctcccttcggattttcattcggagggagcttttttcaagatgaagacgttggttgtcccaaacgatttttttatggttcgatccgaaaaaaaatgcgccgaatatgcgtgggttaaaatggattttatatatttgtaggaactaattcggaggagtgtgatttcgggaacagttccgatgtttccggtcggagtcggggagagatcgcttgcgatcgagtctcggatggaggtgaggaagagaaagattccggtgatcccggatcgaatgcctgcggtcggatttgccggcggggaaagcggtgctgtatgccgtgcgtttcggtcggcggggtcggtgcggggccgggctgcatcccggaatccgtgacgcgaggtcatggagtgacgaataagaaattcaaatataataaacataaattcttatggaaaacaaacttcaacagttaacccagaagctctacgacgagggactggagaaaggccgtgccgaggcggaacgtctggtggccgaagcgaagaccaatgcggccaagatcgtgaaggaggccgaggcgcaggctgcgaagatcctcgccgaagccaataccaaagcacaggacgtggagaagaacgcgatgaccgaaatttcgctcgcgggcaagcaggccctctcgaagatcaaagccgagatcagctccatgattatcgccaagagcaccgctcccgccgtgaaagccgcgacgctcgatcccgaattcgtaaagcagatgctgcttaccgtcgccaagaactggagcggcgccgattcgtcgaagaaccagttgaaggccctgctgccggaggcggaacagaaggcgttcgaagcgacgttcgaagccgctgcgaaggagctgctggccgcaggcgtcgaggtgggttattcgaaggaggtcaggacgggattcaaggtgggtgccaaagacggcggctactacatttcgttttcggaccaggatttcgacgctctgttgaaggagtacctgcgcgacaaggtctataaaatgctgtataacgcttaagccgggcgccatgttcgacaagaattactactgtttggtagccggattgcgggagtattcgctcgatgccgataccaagggcttcaacgcccgggcgatcatcgaggagattctcgaaggggtttccgcccgcgacgcacgttgcgtgcgcctgctttacggttactacgactgcgagaacctggttaatttccgcaagggacgcacggcgcacaacccgctgggcaacctctcgcgggaagagatcgaggagcagaccaagaaccccgaccggcttccggcgcgtatggcgaccgtggtccgttcctattcggccatcgtcgatgaagatgccgacaacgaggacgggatcgacaccgaccgatcgttcgagaacgctcttttctcggcctactacgacgagtgcgcccactccaaaagccgtttcctgcgccagtgggccgatttcgaccgcaacctgcgcaacatctctgccgccgtcgtagcccgcgttacgggacgttcggccgagcagtctgtcgtgggcggggatgaaacttcgcagcagctcaaacgctcgtcggccgccgatttcggcttgcggggcgatgtcccctatctggaggcggtgatcgctgccgtgaacgacgaaaccaacctggtggagaaggagcgcaagatcgacgcgatccgctggaaccaggccgaggagctttccactttcgattatttcgacatcaacgcgctgctggcttacctggtgaaggtgaacatcgtggcgcgctggacccgtttggacgacaagcaggggcgcgaaatgctgcaccgcctgatgaccagtctggacggcaaggatttgatcaataaacaataaaacagataatgaaaacaacaggacgagtaaacggtatcatctcgaacatcgtgatcgtgaaggcggacggccctgtcggccagaacgaaatctgtcacgtttactgcggggataccaagatgatggccgaggtcatcaaggtcgtgggcgacaatgcctacgtgcaggttttcgactcgacccgcggactgaagatcggcgaaaaggtcgaattcgagggtcacatgctggaagcgacgctcgctcccggtcttctttcgcgcaactacgacggtctgcagaacgacctggagaagatggacggtctgttcatcgcgcgcggttcgatcaccgaccctatcgacttcgagaagaagtgggagttcaagccgctggctaagcccggcgacaaggtttcggccgcatcgtggctgggccaggtcaaggaggagtgggtcgagcacaagatcatggtacccttcacgatggagggaacctatacggtcaagagcgtcgtgcccaccggagagtacaaggttacggacacgatcgccgtcatcaccgatgccgatggccgggatcacgatattacgatggttcagcggtggcccgtgaagcaggccgtgcgctgttaccgggagaagccgcgcccctcgcgcgtcatggagacgggcgtgcgggccatcgacactttcaacccgctggccgagggcggtacgggcttcatccccgggcctttcggtgcgggcaagacggtgctccagcatgcgatttcgaagcaggccgatgccgacgtaattatcatcgtggcctgcggcgagcgtgccaacgaggtggtcgagatctttaaggagttccccgagctggtcgatccccgcacgggtcacaagctcatggaacgtaccatcatcatctgcaatacttcgaacatgcccgtcgcggcgcgtgaggcgtccgtttatacgggtatgaccatcggcgagtactaccgttcgatgggcctcaaggtgctcgttatggccgactcgacttcgcgttgggcgcaggcgctgcgcgagatgtccaaccgtttggaggagcttccgggccaggacgccttcccggtcgatctttcggcgatcatttcgaacttctatgcgcgggctggtctggtcaagctgagcaacggcaagacgggttcggtgaccttcctgggtacggtgtcgcctgccggcggtaacctcaaggagccggtgaccgaatcgacgaagaaagccgcccgctgtttctacgccctttcgcagggccgcgccgattcgaagcgttacccggctatcgacccgctggagtcctactcgaaatacctcgaatatcccgagattgaggagtacctcgacacccgcatcgaaaagggctgggtggataaggtttatacgggcaagacgctcgtgcagcgcggtaaggaggccaacgaccagatcaacatcctgggtgacgacggtgtgccggtggagtaccacgagcggttctggaagtcggagctgatcgacttcgtgatcttgcagcaggacgccttcgacgagatcgacgccaactgcccgatcgaacgccagaagatgatgtacgagatggtgctcgacatctgcgaccgggagttcgggttcaccggtttcgaggagtgcgcatcgttcttcaagggcctgatcaacctcttccgtcagatgaactattcggagtggaaatcggagaaattcgaggactaccgccgtcagatcgagaaaacagtgagtgaaaaagaatccaaataaggcgcggtatgacaacacgagcatttcagaagatatataccaagattgaaaacattaccaaggcgaccgtgacgctgcgtgccgaaggcgtgggtaatgacgagctggccaccgtgggcggcaagttggcccaggtggtgaagattatgggcgaccaggtgactttgcaggttttcgcgggcacggagggtattaccaccgattcggaggtaattttccacggcgaacccccgaagctgcgcgtttcggataacctggcgggccgtttcttcaacgcctacggcgagcctatcgagggcggcgagcagatcgagggcgaagcccgcgaaatcggcggtccgacggtgaatccgttccgccgcatccagccgtcggagctgatcgccacgggtatcgccggcatcgacctcaataatacgatcgtgacgggccagaagattcctttcttcgccgatccggatcagccctataacgccgtgatggccaatgtggccctgcgtgccaaggccgacaagatcatcctgggcggcatgggtctgtcgaacgacgacttcctctacttcaagcaggtgttcgaaaacgccggtgcgctcgatcgcatcgtttcgttcgtcaataccacggagaatcccccggtggagcgtctgctcgtgccggacatggccttgaccgccgccgaatatttcgccgtcgataagggtgaaaaggtgctggtgctgctgacggacatgaccctttacgccgatgcgctggccatcgtatcgaaccgtatggatcagattccttcgaaggactcgatgcccggttcgctctactccgacctggcgaagatctacgagaaggccgtgcagttgcccaacggcggctcgatcaccattatcgcggtgacgaccctttcgggcggcgacatcacgcacgccatccccgacaatacgggttacatcaccgagggtcagttgttcctgcgcaacgattcggacacgggtaaggttatcgtcgatccgttccgttcgctgtcgcgtctgaaacagttggtgatcggcaagaagacccgcgaggatcatccgcaggtgatgaacgccgccgtgcgtctctacgccgatgcggccaatgccaagaccaaactggagaacggcttcgacctttcggactacgacgagcgtgcgctcaagttcgcttacgactattcggagaaactgctggcgatcgacgtcaatatcgaaattacgcagatgctcgacacggcgtgggagctcttcgccaaatacttctcgaaggaagaggtggctatcaagagcgaactggtggagaaatactggcctaaaaccgagtagagcaattcaactcaaacagaatggctataaaattccaatataacaagacctcgctgggcgaactcggaaaacagctgaaaatgcggcagaaggcgctccctacgatcaagagtaaggagtcggccctgcgttccgaagtgaagaaggcgaaggacaccgcacaggatttccgacggcagttggacgcgcttacggcgcagtacgactacatggtttccctgtggggtgagttcgatgcggacctgctgcgcatcgccgacgtcgatcttgcggagcagaagatcgcgggcgtgcgtacgccggtgttgcaggacatccgtttcgaggagaaggattacgacctcttctcggctcccgtgtggttcgccgacggagtcgatattctcaagcgcctcgcgcgcctgggtatcgagttcgaggtgttcaaccgcaagatggagttgctggatttcgcacgccgcaagactactcagaaggtaaacctctacgaaaaggtgcagatacccgggtacgaggatgccatacgcaagatcaaacgcttcatggaggatgaggagaacctctccaagtcggcccagaagatcgtgaaaaccaaacaacagcaagccggggagggcgcgatgttatgatagcgagaatgtcgaaatacgacctggtactctatgcgggtcagagcagcgacttcatcgagaagctgcgcggcctggggctggtcgatattaccactacgggatgggagccttcggacgaagaccgtcagctgctgcttacgatcgacaaccatcacaaggcagtcgagaccctgaaacgattcttggaggacgagcgctttgtcaaggacgagcagcccatcgccgacggcggcgaggctttcgaccgctacatggccgctacgcagcaggcagcggcgctccgttcggagatcgcacgcttgcagaaaaccgccgacgagctgcgtccctggggcgatttttcggtcgatacgcttcgcaagttagcggacaagggcgtggtgttgcgctatttcttcaccagccgtgcggcttacgagaaggatatcgaggcgtggtcggagcgttatacgatcgctctggtgcacgagggtgaaaccttcgattacttcgtggtcgtgacccggccgggcgaggaggtggtgctcgatgcgcaggaggtcaaggcgccgacgatggactgtcgtcaggccgaagcccagatcgccgaggctcgcaggaagctcgcggagctggatcgggaattttcccgtgcggctctttcggtggaggcgatccgccggcatgggatcgagctcaagcggaagttggaagagattcgcgtgaagaatactgcgcagcctgaagccgacggtacgctggttattctggaggggtgggccgaggagtccgattccgcgaaggtagatgctctgctggccgaataccccaatctgattttcctgaagagtacgccgacccccgaggacaataccccggtgaagctgcgcaaccgtcccttcgcccatctgttcgaggtgatcggcgcgatgtatgcgctgcccaaatacggcacgatcgatttgacacgcttcttcgcgcctttctatatgatcttcttcggcttctgtatggccgagggcggttacggactggtcatcatgctgggcggtttggccgcagtgatgctgggtcgcaagaaggggagttcagccatgaaggagatcggtatgctgacgatgctgtgcggattttcgggcatggtcttcggcctgatgtcgggctcgtttttcggattgcagctttccgaatgggagtggctgggcagcctgcgcgatcacctgctgacaccggacatcctcttcccgctttcgatcggactgggtgccgtgcaggtgcttttcgccatgatgatcaacgcttatgtcacggcccacagcttcggcctgcgctatgcgctggggctgatcggctggatcatcgtgctggtcgatagtgccgctgcgttcctgttgcccgaaagcgtgggcttcacgttccattcggtcgcttatctggtgatcctgggcgtcggcctggtgctgatgttcttcttcaattcgccgggcaagaatatcttcgtgaacttcggactcggtatctggaatacctataataatgtgtcggggctggtgggcgatctgctgtcgtacatccgtctgttcgccatcggcctttcgggtggtattctggcgatggtcttcaaccagttggccgttggtatgagtcccgatattccggtcgtgaagcagctcgtgatgttgctgatcctgctgctgggacacggcatcaacctcttcatgtgcgttctctcgtcggtggtgcatccgctgcgtctgacgttcgtggagttctacaagaacgccgggttcgaggccgcaacgcgcgtcttcaccccgttgaaaaacgaataaactaaatgataatcaatattaacaactaaaacaaaattcgatttatggaacctattacgttgggctatctcggtatggccatcatgtttactctggcggccgtaggcagttgctacggcactaccatcgcgggcaacgccgcagtcggtgcgatgaagaagaacccgaatgccttcggtaactacatcatcctgtcgggtctgcccgcttcgcagggtctttatggctttgcctcgctcttccttatcatgaattacctgaccgattcggttacgatgctgcaggcggccgctatcttcggtttgggtatcttggtcggcctggtgaactttttctcgtcgtatcgtcagggccagctttgcgccaacggtatcgctgccgtaggtaacggtcatgacgtgggtaccaaaaccctgatcctcgccgctttcccggagttgtacggtattttgaccgtggcgatcaccttcctggtaaccggtctgatgaagtaatcgaaatcccggatttcgaaagaacaggcggagcttctgcaagctccgcctgtttgtgttttgtgaggaagagggtgtgtgtggaggggttttggagaaggcatgagaggggacggttcgattcgaggcggagtaaattgcggggttcggcaatgttgctgtgtcccggcagatcggacggttacggggtggaaaccgttggaattccggggtgtctttggaatccggtcgtgtcagtcatagacggctgttttgtgcggtcggctttgttgggtatgctgctttattctgttgtttggagcgcttgttcgatttgctcgatcagcaggcgttgtattgttgcgtcgtagtcggtttcggagagcaggattttgccatcgggactgatgataaagttgcggggaacgtatcgggtggcgtagagcgagtagattgacatgtcgggatccagacctacggagaatgcgattcccagctcgcggcagaattcttgaacggtctgctgcgtttcgcctcgattgattggaaggaagcgaaatttccggtcagcaaagcgatcgacgatttgggtttgcatctgctgcatttgtttccggcaggtcgggcaccacgtggagaagaaggtaagcaacaccacgttgccttgcaggtcggacagggtgatcgctgtgtcgtcgagcattccgaccgtgaagtgaggggcctcctctccgacgcggacgagcgtggtttccttttccgtcgggatctcttcggaaaggcagcccgttagggcgagtacaagcaggaacagcacaatagtcggctgtacggtccggtatagaagtccgagatgtcgtgtaagtccggatcgagagaagaatcttgtctgtcgaagagcaggccgtaaatatgccgtcatagggagttggttataatcgtcgggtagagttcaaaattcgttccgaataaaaaagccggaattttccggctttttttcgtgcagggaaatacccctcttcagttgatatggcttgccgcatggggatcgttaccgcattcggtaaagctggtcccgcagacgaggcgtgaagcccgcctcgcggatcgcttgttggatgcctgcggcatcgaactggttgtgcgccccggccgaagaaacgacgttctcctcgatcatgatcgaacccatgtcgttggcgccgctgtgcagcgctacctgagcggtggccttgccgacggtgagccacgaagcctggatgttgcggatgttgttcagaaccagtcggctgacggcgattatgcgaatgtattccaatggtgaaaagcgggttgcaactccctgccgctccaattcggtgcccgacgagcgaaaaatccaagggatgaaggccagaaagccgtaatgtccttcgggacagcgggcctgcaggtcgtggatgcgcagcaggtggtccacacgctgacgggatgtttctacatggccgtacatcatcgtcgccgaggtcggcaggttgaggcagtgggcttcgtgcatcacctggatccactcctcgaccgaaggtttggcgggcgagatggctttccgcacgccgggatcgaggatctcggccccggcacccggcagggagtccaatccggcggcgatcagccgtttcagggtgtcgagcgtggtgaggccgctgatgcgggcgatgtgcgccacttcgggcgctccgagggcgtgcaggcgtacctgcggatagaggctcttgagtgtcgagaagagctcctcgtagaaatcgatccccagcttcgggtgtagaccgccctgcagcagcaactggtcgccgccgagggcgagcatccgctcgattttctccttgtattcatccagcgtagtgatgaaagcccgctccgtctggtggggtttgcagtggaaattgcagaagtggcagcccgaaatgcagacgttggtgatgttcacgttgcggtcgatctgccaggtcacgacctccaggtcgggcactacggcacggcgcacgcggtcagccgtgagagccagctcctgcaggggggcctgttcgtaaagccaatacgcctcctccgccgtgaggggatcacgcttcagacatttttcgtatatctcttccgcacggttggggccggttccggcggttcgctgcgtctgttcccggatcatcgcttcgatccttttttgccccctttgcgggacgttttgccgcccttacccggtcgggacgtgctttggcggcgtaccggaatcgctgcgtgcccctttacgtcgttctcgcgggagtcggccgccgcatcgtgcaccagttcgaaatcgagctgacggcgttgcagatcggcccgcttgacgcggatgcgcacggcatcgcccaaggtgaagacccgtcctttgcggcgtccatagacctcgtagcggttctcgtcgaactggtagaggtcgtcctccatttcccgcagcgaaaccatgccttcgatgtgagtttcgtccagctcgacgtacatgccccagtcgctcatgcccgagatatggccgtcgaagaactggccgattttatcctgcatgaactccaccattttgtacttgatcgaggcgcgttcggcttcggcagcgatcacttcccgctccgaggcgtgtacgcagagtttctcgaaggtgtcgcggtcggccgatttgcctccttcgaggtagcgggccagcagccggtggaccatcatgtccgggtagcggcggatcggcgaggtgaaatgcgtgtagtaggggaaagcgaggccgtaatgaccgatgttatcggtcgagtagaaagccttggacatcgcacgtacggcgaggttcgaaatgacgttctcctcgatgcgtcctttggcctgtcccagcagcttgttcatctccttggccacggcgcgtcccttgtcggccttgaatacgtagccgaagcgcagaacgaaggtccggaatttttcgagcttctcctcgttcggaacgtcgtgtacgcggtaaaccatcgtgcgccgcacggcacggccgttcactttgtgatgtccgcagaattcggcgacctgtttgttggccagcagcatgaactcttcgatgagctggttggcctccttttgctccttgaaatagacgctcaggggtttgccttcggcgtcgagtttgaacttggcctcttcgcgctggaagctcacggctccgtgcttgaagcgtgttttgcgcatccgctgtgccagacggttgagcgtcagcacctcttcggcgaagtcgcccttgccggtttcgatgatctgctgcgcctcctcgtaggtgaagcggcggtcggagtggatgaccgtgcggccgaaccatttgtccagcacctcggcctcctcgttgagcgtgaagaccgccgagaagcagaggctctcttcgtcggggcgcagcgagcaaagctcgttgctcaatttttcgggcagcatcgggatcgtgcgatcgaccagatagaccgacgtgccgcgctcctcggcttcggtgtcgatcaccgagcggggttgaacgtagtgggtcacgtcggcgatatgtacgcccacctcccatacgccgtcttcgatcttgcggatcgagagggcgtcgtcgaagtccttggcatccgccgggtcgatggtgaaggtcgttatcttgcggaagtcgcgccgggcggcgtaatcggctttggtgatcgtcgaaggaatggcctgggccgcatcttcgatcttttgctcgaaatggtagggcaggccgtattcggccaggatggcgtgcatctcggtattgttctctccggcgcggcccaatacctcgaccagctctccggcggggcttttggaacccagcgcccagtccgtgatgcggatcacgactttgtcgccgtgctgtacgttagggttgtcccgcttggagagatagacgtccatcggcatgcgccggggatccatcttgacgaagatggcgtggtcgctcacgtcggccgtgcccacgtattgcttgcggctgcgctccacgatgcgggtgatctcgccttcgagggacccggcgtgggagcggcgggtgatgacgaactccacgcggtcgccgtccagagcattcagcgaattgcgctggctgacatatacgtcgttttcgaactcctcggagcggatatacatcgctcctgtcgagatcatctgtacgatgccctcctggcggggacgctccttgccgctgagacggtacttttcctgcccgcactcctcgatagtgccctgggcgagcagttccgtgatgatttcacgggtacgaagacggccctccttggtggcgccgcccgaggccgaagccagatgcttgagggagaacttgttgttcgggaattcccggaacaggttaatgatcagcgaagagcggtcgaatgcggccgacttcttcgtatttttcagtttattcatcggttgaaatagttacgggcgaggagttccatgaaccggatgccggtcggaatggccgcctcgtcgggattgaaggtggatgtatgcagttttccggctccgggaccgacgcccaggcggtagaagatcgccgggtagcgggtgccgtagaagccgaaatcttcggaagtcatgcgcaggggcagcatttgaaagggaattccttcggtttcggccagtgcgacggcctgccggatcaactccgggtcattgaccacgcacgggtagccgggggtgaagtgtacccgggttcgtatgccgtacgaggcgtcgttcgcggcggcgagttcttcgatcctgcgtttcacttcggcccgttcccgttcgtcgaaggtacgcatcgttccctccatatagacccggtccgggatgacgttcgtagcgcccgcagcttcgaccttgccgatcgaaacgacccgttcgggcgtgttcagggccgtgaggtgcaggatcagttgtgcggcggcgctcaccgtgtcgcggtgttcggcacgcatggccgcgtggccgcccgcgccttcgagcgtgaggcgcagttcgtcgttggaggccatgtacttgcccgcgcggaagcccagcgtgcccgcgtccaaagcgggttcgacgtgctcgccgacgacggccagcaccgtatagccttcgaaggggttttcggccagcactttggaggctccgccgggattcgattcctctccgggttggaagattccgaaaagagtaccctcgaaattccgctcggcggagagccggagcagggtgccgtagagcaccgctgcgtggatgtcgtgcccgcaggcgtgcatcactccgtcgttctcggaactccacgccgcgccgctctgttcgcggatgggcagggcgtcgatgtcggctcgcagcacgacggctcgccgcaggtcgccgcgtccttcgattttggccagtacgccggttccggcgatcggacggcaggggatgcctgcctcgcggagcgcctcggcgatgaagcgggcgctctccgtttcgcggaacgagagctccgggtggcggtgcaggtggcggcgaaactctacgggtgtcatggttaagtgtttaatagcaattactttgccctattcggaattagaatacgttgcgggcgatcttgcggatgttgtccgtgcgtcccatcgtgtagaaatggatgatcggcactccggccgccttgagctccttggcctggtggatcgcccattctatcccgacctcgcgggccgcctgtgtgtcctcgccgcaggcccggacggccttcaccagctcttcgggcaggctgacgctgaaggtgcggggcaggatctccaggtgcttgggcgtcgagatcggcttgatgcccgggatgatcggtaccgtgatgcccgctttgcggcagcgctccacgaaatcgaagtacttgctgttgtcgaagaacatctgcgtcacgatgtagtcggcgccggcatcgaccttttccttcaggtattggaggtcgctctggggattcgccgcctcgaaatgcttttcgggatagcccgccacacctaccgagaacttggagtggtggcactcctcgacttcgccgtcgataaattctccccggttcatggcctggatctggcgcaccaggtcggcggcgtgggcgtgtccctgggcgtaggggacgaagcggggttcgttctgccgcttgtcgccccgcaatgccagcacgttgtgcagccccaggaaatccatgtcgatcagcgaatcctcgatgtcgtatttcgaccagcccccgcagatcaggtggggaaccacctccacgtcgtacttgcgccggatcgcggccgagatgccgaccgtgcccggacggcggcgcatgatgtgccactcgcggcttccgtcggggcggatgtcctctttgagggcttcgcggtggaaggtgacgttgatgtaggccgggttgaaatccatcagcgggtcgatggctccgaagacgctgcgcgtgccgtcccccttcaggggcgggagcagctcgaaggcgaaacgggtcgtgcgcgaagcgacggcgccctgtatgagatccgtaatattcatcagatgttattgggtatcagtttttcgatcgtttctatgtccatgttgcggcgtgcggcgtagtcggccagttgctctcggtcgattcgtccgacggagaaatattcggcgtcggcgaagaacaggccgcagagcgcctcctcaggtgtaatcatatagttgtcgttcagacgcatggcggtcgtcttgtcggcggccagcaggtcgaagacctcgcgtttgagcgagtggtcgggacaggccgggtagccgaaggccatgcgccgaccccggtatttgctgcggatgatctgttcgggtgtgagcgccggaccggtttcgtaaccccacatctggcggcggatgaagatatgcacccattcgcagagggcttcggtcaggcggtcggccagcagcttcgagaggatggcgttgtagtcgtcgccctccgcgcggaacttttcggtcagctccttgagccctatgccgcccgtgagggcgaaggccccgatatagtcggttctgcctgccttttcgtcggcgatgaaatcggccagacagcgggcctgggcttcccggaccggggcctggctgcgcagcatcggcaggatgtatttcttgtctttcgggccggtgaccacgatgtcgtcgccccggctgacggctgcgaagatgcccgctacgccctggagggtgaggagtttttcttcgcggatgcgggccagcatcttttgcgcgtcgtcgtagagcttgcgggcttcggcgccgtgttcggggttttcgaagatctccggtacgcggcccttgagcccccacgccgggaagaagaagttccagtcgatcagcggctccacatcggcgatacttatgtccggaaacaccagccgtcccgtatgggccggaacagcgatttcggacgcgggtttcggcacgcgcagcttgcgcacctgaccgaagggtaggatcgtgcggatctcctcgcggcggcggtactggtcgcgcagggtctgttgctcctcgcgcacgcgagccagatactcttcccggccgggaccgagcagttcgccgaggattttgttgttgcggctggcgttgtcggcatggatcaccgggcccgagtaggtcggagctatttttacggcggtgtgtacgtccgaagtggtcgcaccgccgatcagtacgggaatttgcaacccccggcgttccagctcttcgcagacgtggatcatctcctcgagcgaaggggtaatcagtccgctcaggcagatcgcgtcggcgccccaggcgacggcttcgtcgatgatgcggggacactcgaccatcacgcccaggtcgcggatcgtgtagccgttgcaggccatgactaccgccacgatgttcttgccgatgtcgtgtacgtcgcctttcacggtagccaccagcaccttgccggcactcttggcgttcgcttcggaaccttgctcgatgtagggagtcagtacggcgacggcttttttcatcacgcgggcggtcttgaccacttgcggcaggaacattttgccctgcccgaacagattgcctacgacttccatggccggcatcagcagccggtcgatcactgccaggggcgagcccagcgtgcggtagccttcgagcgcgtcctgctcgatgtagtcggccacgcccttgagcatggcgtattcgatgcgcttgccgagcggctccgagcgccaggcgtcggtatgctgcgtctgcgtcgcggcggttttggtgaattgcgaggcgtattccgtgaggcgttcggcggcgtctgcgcggcggcagaggataacatcctcgacccgttcgagtagtcccggttcgatgtcgctgtagatttgcagcatctggggattgacgatcgccatgtccatacccgcttggatggcgtggtagagaaacaccgaatgcatggcctcgcgcacggcgttgttgccccggaaggcgaacgatagattcgacacgccgcccgaaatcttggcgtggggcaggtttcgcttgatccagcggacggcttcgatgaagtcccgggcgtaggcgtcgtgggcttcgataccggtggccaccgcgaggatgttggggtcgaagatgatgtcttcggcggggaatccgtcgtcggtgagaagcttgtaggcccgctgcgccacctcgatcttgcgggcataggtgtctgcctgtccctgctcgtcgaagagcatcaccacggcggcggctccgtaacggcggatgaggcgggcgcggtgcagaaattcttgctcgccctccttcagggagatggaattgacgacgctcttgccctgcaccacccggagccccgtttcgagcacctcccatttcgaagagtcgatcatgacgggtactgcggagatttccggttccgaacccatcaggttgaggaagtcgcgcatggcttcgggaccgtcgatcaggccgtcgtccatgcagacatcgacgatattggcgcccgcttcgacttgggcgcgggccaccgagagagcttcctcgtaatttttttcgcggatcagccgcgcgaacttggccgagccggcgacgttggtgcgctcgccgacattgacgaagttggcttcgggaacgatccgaagctgttccagcccgctcaggcaggtcacgtgccgccgctgcggcagggggcggggcgtgtagttgttcacgatcttcgccagttcgaagatgtgcaggggcgtggtgccgcagcagccgcccaccagattgaccaggccgcgccgcatgtattcctctacgtcggcggcgaacatcgcgggcgtctcgtcgtagccgcccatgacgttcggcagacccgcattgggatagaccgccacgcggaattccgaaacagcggccagccgctccaggtagggcagcagggccttggcgccgaacgagcagttgaggctcacggccagcggttcggcgtgtgcgacggaggtgtagaaggcttcgatggtttgtcccgccagggtgcggcccgacgaggtgagtgtgccggagacgatgaccggcagtcgcatgccgcgttctgcgaagagggtttcgatggcgaagatcgctgccttggcgttcagcgcatcgaagacggtttcgagcatcagcaggtcggcgccgccgtccatcaggccccgagcctgatcgtagtacgcctgcgagagctgttcgaaagtgaaagcccgggcgccggggttgtccacgtccgccgacatcgacagcgtatggctcgtcgggcccatcgagccgcccacgaagcggggcttctgcggattgcgggcggtgaaggcgtccgccgcttcgcgggcgatggctgcgccgacccggttaatgcggtacgcttccgctgccagtccgtagtcggccagcgaaatggagttggcgttgaacgtgttggacgtaattacgtccgatccggcctggaggtatttctcgtggatttcgcggattgtttccggacgggtgaggttcagcaggtcgttgcagcctctgagaagtttttcgctcgcggcgaactccttgccccggtagtcggcttcgtccaggccgtattgctgtatcatcgtgccgaatccgccgtcgagcagcaggatgcggtgttcgagttcgtgtcgtatgtcgcggttttttgtcacgtcgtgtggtattttattggggtatgatttcgatttcgaagagtttgctccatcttttgcctgtcacgaagatacgttccgaggccgcgtcgtaggcgatgccgttcagtacgtcggtatccggggcgatctcttcgtccgggagcaggccgcgcaggtcgatgaccccttcgacgatgccgctggcggggtcgatgatgacgatctggtcggtgacatagacattggcccagatcttcccgtcgatccactccagttcgttgagcagttgtaccggggcaccccggaaggtgaccggcacgctgcgttgcacccgaaaggtttccggatcgaggatgcgcaggtattcgctgccgtcgctcatgtagagccgctcgccgtcggtcgtgaggccccatccttcgcccgcataggcgaaagtgcggagctgccggcccgttgccgcgtcatagacgtaggctttgttgttttcccaggtcagttggtagatcttgccgtcgagcagcgcgatgccttcgccgaattcgctgcggggcagcgtagccactacgtccgtgcgtcctgtttcgaggtcgatgcgctgcaggcgggagtgtccgtattcgcccgtaccttcccacatcactccgtctgcgaacaggagcccctgcgtgtagctgtcggtcgaatggggatagctttcgatgacccggtaggtgtaggtgcgcggcgcggcgggggtagcggccggggtttccgttcggagggttttcgtgcgtcccgagcaggcggccagcgtcatcgccagcagtccgatccatacgatttttgtcattggatttcgtatcgtttatattctgtccggctgcggtgttggccgtttatagccggtatgtccttattataataggcaacaaagatagctatttttcgggaaaagacgtcgatttcggcgcccgaattacggatcggaggggctgtcgatccgggtgctcttccccgaagcccttcctgaaagaaaaacggatcggtgcggagatatttatcgggtgtttgttgcttgctaatgaattattttgtacttttgccgacccgaactgtaacgtataaaacaactgaaatatgaatatcgtaagagaacagcgcgagcagaataactcgctcatcaaggtgaccgtaggcgagaaggattacggcgatgcggtcgaaaaatccctgcgtgagtacaaacgcaaggccaatattccgggcttccgccccggtatggtgccgatgggcgtgatcaagaagatgtacggcaagggcgtgcttgcggagcaggcttaccgccaggcttcggaagcggcgttcaactacctgcaggagcagaagatcgactatgtcggtgacgtgatcccctcggaggagcagggcgacttcgatttcgagaacgggaccgaattcgaattcattttcgagatcggcgaagctcccgaggtgaagctcgagctgtcggcgaaagataagatgacctactacacgatcaaggtcgataagaagatgcacgacgattaccgcagcaatttcctgcgtcgtttcggccgtctggtggataccgacaaggtaacggcggacgaagcgctggaggtgacgctcgacaacggcgatatgaagatcgagggcgcttacgtcggactgatttcgatgaacgaggaggagcgcaagcccttcatcggcaagaaggtcggattcaagatgcaggtcaatgtcaatgaactttacaagactccggcgcagcgtgccgccgtattgcaggtcaaggagaacgaattggagggtatcaaacccgaattttctctcgaaatcaccaagatccgcaagttcgcggaaccggagctgaacgaggagttcttcaagatggcttttcctgcgggcaacgtcaaaaccgccgaggagttcgaggcgttcgtcgatgccgagatttcgaaggagctgcgccgcgagagcgactatctctttacgttgcagttgcgtgatttcctgttgaagaaagccgggttgaccatgccggtcgagttcctcaagcgctggctgtacgtcatcaacgaaggcaagttctccaaggaggagatcgagaaggatttcgacgctttcgtgaaactgttcacctggaattacctccagaaatatttcatcaagcaggataacctcacggtaacccccgaagaggctactgcagaggccaaggcgttggcacaggcccagttcgctcaatacggactgccgacggctccggaagatatgctggccaattacgccaagaagattctcgaggaccgcgagcagggacagaagatctacgagaagctgtatgagatgaaggtggtcgaggacgtgaagtccaagatcaaggtgaccgaaaaggccgtttctgccgaagagttcgcaaaactggccaaggagatttaagaaacagcggaaaattggtatccgatcagagctttgagggtttgatttttgcaatcactccctcaaagtctgtttagtagtcatacttctgttttttgcttcttccctcgtttttgccggattcgagcctgcatcgtgtgttggccgggtacgggaaatcgagtaggaccggaggcaagtcgcggaaaaatttttgaaccggcttccgatgttttttattaacttgcaaactgttcggttatgaatgaatttgaaaaatacgccacccggcattgcggtatcaatagtctgaaactgcatgatttccgctcgcagtacgcggcctacgtgtcgccgacgatcatcgaggagcgccagttgaacgtggcgacgatggacgtcttttcgcgtttgatgatggatcgcatcatctttttgggggctccgatttacgacgatgcggccaatatcatccaggcacagctgctgttcctggagtcggccgacccggaaaaggacatccagatttatatcaactccccgggcggatcggtgacggccggtctgggaatttacgatacgatgcaactggtgcagcccgatgtggcgaccatctgtacgggactggccgcttcgatgggcgccgtgctgctgaccgccggtgctgcaggcaagcgctcggcgttaccccattcgcgggtgatgatccatcagccgctgggcggggctcaggggcaggcgtcggacatcgagatcacggcccgcgagatccgcaagaccaagcaggagctgtacgagatcattgcggcccattcgggcgctccgatcgagaagatcgaaaaggatgccgaccgcgattattggctgtcggctcgggaggccaaggagtacgggctgatcgacgaggtgctgaccaagcggggataatatttctgtttcaatctgcaggggacggtcgatttcgggagagaaaatgtatcgtttccgatcagcggaggcagagcggggcgctcgataggccgagcggaataaatgaagaacccggttcgatatttccggtgtgcgaagtcggaacgaggccgatcgacggccgggtagagatgatggcgggagtttgttttcgactttatcccggcagaggctcgtccgaaagttcgaccgggaccgggaacgaaattcgaaggaaaactaaagacctatggctaaaaattacggagaagacctttacggcaacgagagcgatgcgtgttcgttctgcggggccaaacgccgcgatggtgcgatcctgttgagttcgtccaagggttgcaatatttgcagcaaatgtattgcgaaaggataccagatgctcatcgacaacgatgtgctgcatgacgaagccgcatcccgtcgcaaggagaagaagaatacctcgttgaaattcgaggatttgctcaagcccaatgaaatcaaggagtttttggatcagtacgtgatcgggcaggacgatgccaaacgctatatgtcggtggccgtatataatcactacaagcggctgctgcatgcttcgggcgaggcgagcgaagtggagctcgacaagtcgaacatcctgctggtcggcccgacgggtaccggcaagacgctgatggcccgcacgatcgccaaattgctgaacgtgcccttcaccatcgtggacgctacggtacttaccgaggcgggatacgtgggcgaggatgtcgagagtattctctcgcggctgttgcaggtggcttcctacgacgtggagctggcccagcggggaattgtcttcatcgacgaaatcgacaagatcgcccgcaagagcgacaatccgtcgcttacgcgcgacgtatcaggtgaaggagtgcagcaggctttgctgaagattctggaaggcacggtggtcaatgttccgccccagggcgggcgcaagcatcccgagcagcagttcgtgcaggtcgatacgcgcaacattctgttcatctgcggcggagcgttcgacggcatcgagaagaagatcgcccagcggctcaacacccgggcgatgggttacggacggatgaatgccgattccgtggaccgcaacaacctcatgcaataccttatgccgcaggacctcaggtcgttcggtctgattcccgaactggtgggccgcctgccggtgctgacctatatggagccgctcggccgcgaggccctgcgttcgatcctcacgcagcccaaaaatgccatcatcaagcagtatgaaaagctgttcgagatggacggcgtgaagctcgtgttcgacgacgaggtgttggactatatcgtcgataaagccatcgagtaccggctcggtgcccggggattgcgttcgatctgcgaagcgatcatgatggacacgatgttcgatatcccctcttcgggagagcgccgcttcgaagtgaccttgccttatgcccgggaaaagttcgaaaagaagaaatttttggcgctcaagcaggtcggataagccggatttatattaaatttgtaccacgaacgccgggccgcttgcaacatgccggagcgggaggctgtcggaatggaacatcgagcgggcgggatttccggttttcaatgcggtcttgtctgcctggttttccgcaggaacggaaccgggcggatctgacgcgggcgcgggccgggtgaaaggattccgcaatttatcctgaacaggatacgcaagtccgttgcatcggggtggtgcaggtttatccgggttacgccgtatgtagcagcgaagcgagaaattcaaacataataaaagcatacaatcacttatgattactaaatccgaactcacgcgcgttgcagacaacatccgcatcctgtctgcggcgatggtcgagaaagccaaatcgggacatcccggcggcgcaatgggcggcgcggacttcatggctgtactttacaccgaatttctccgctacgatccggaccagatggattatcccttccgggaccgtttcttcctcgatccgggacacatgtcgccgatgctctactcgactctcgcactggccggaacttattcggtggaggatttgcgtaatctgcggcagtggggcagcgtcacgccgggccatccggaagtggacgtgctgcacggtgtggagaatacgtcgggtcctctgggccaggggcatgccatggcgctgggcgccgcgatcgccgagcggttccttgcggctcgtttcggggagtggcagtcccacaagatctatgcctacatctccgacggcggtatcgaggaggaggtgtcgcagggcgtgggccgcatcgccggccacctggggatgaacaatctgatcatgtactacgattcgaacaacgttcagctttcgaccaaggtcgatgaggtggataccgagaacgtagcgatgaaatacgaggcgtggggctggaacgtcatcaccatcgacggccatgacgtagagcagatccgcgaagctcttacggctgccaatgccgaaaaggagcgtccgatgcttatcatcggccgtacggtcatgggcaagggtgcggttgcggccgacggatcgagcttcgaggacaaggtttcgacgcacggtcagccgctgacggctgccggagccgatttcgccgctaccgtccgcaacctgggcggcgatgcggaggatccgttcaagatcttctccgagagcggcaaggtgttcgacgcccgccgcgaagagcttcgtgaatgggtgcgcacgcagcgcgagagggagaagacgtggcgttccgagcacaaggagctctcccgcaaactcgatcttttcctctcgggcaaggtgccggagatggactacaagggactcgagatcaaacccgacggtgcgacccgcgccgcctcggcttcagtgctctccttctatgcggagcggatcgaaaatatgatcgtcgcctcggccgacctctgcaattcggacaagacggacggctacctcaagaaaaccaaagccttctcgaagggtgatttctcgggcaagtttttccaggcaggcgtttcggagctgacgatggcctgcattgccaacggtatggcgctgcatgggggcgtgattccggcgtgcggtacgttcttcgtcttctcggactatatgaaacccgccgtgcgtctggctgccctgatgcacctgcatgtaatctatatctggacgcacgactcgttccgtgtgggcgaggacggtccgacgcaccagcccgtcgagcacgaggctcagatccgtctgatggaacatttgaagaatcaccggggggagcgttctatgttggtgctgcgtccggccgacggcgaggaaaccgtcacagcctggaaattggcgatcgaggagcatcgtcccgtcgcgctgatcctgtcgcggcaaaatattaagaatctgcccgcactcaatcacagccgccgtgaggaggctgcccagctttcgaaaggcgcctatatcgtagtcgatgccgccaaaccggctgtggtgatgctcgcttcgggttccgaagtcgctacgctggtcgaaggtgccgagttgctttcgaaggagggaatcgcggtccgtatcgtgagcgtgccgagcgaaggacttttccgcgaccagcccaaatcctatcagcagaccgttctgccacagggtgtggtgcgttacggccttacgtcgggtctgcccgtgacattgctgggactggtaggtgaaaacggtatgattcacggtctggatcacttcggttattcggcaccctacaaggtcctcgacgagaagttcggttacaacggccagacggtatatgaagaggtgaagaagttgatcagtaaataagccggttgtaaaacggatagaagacaggcccggatgccgataggcgtccgggcctgtcttctgtttgttccgtcgttctcccgttgattttttcacgggtctttccgctgttttttgcacccgtcgggtttcccgaagacttgtccggcgatgttcggggaagaacgggtgcagctttcaaatcggatcgtggacagagtgcctcggggcggccttttcctgttattgttgataacttttccataaaatgccggaggggcggaccatcgaatgcgattaaaccctatatttgttttcggtatcggttcccgaggtggagggcgaatccaccgggattaaaagggaatcctgtgaaagtcaggaactatccccgtagctgtaagtttcttttgggcggtacattctctctgccactggccgttcgggccgggaaggcgtgccgtccggaacaagtcagaagacctgccgtaccgggacgagattcgttgctttcgggtgaaaagcgtcggaacggtttcgggtgcttcgtcgtatctattgccggttctgtaaattccattcctgcctgtgtcgtatcgggtcggatcgctgcgaatccgtcgttcagaagaggtgtatttcggtttttccgaagggtcggtaaaaagtcgtcggatcggacgacaaccgatatgaccgacgaaggcgtacggtatggctcggaacgtgcggcttgtcgtgtttctgcggagaaagcccggcggctgatatttgttgccgtcgagccgggtcggaatcggccgaatttccgtcggtggagttatcggtgtggggaattcgagcgttgaaagtatgagtataataatataatatttgaggagaagtttaatcgttatggaaacattcattgtcaagagggacggaacgcgggaggcgttttcgatggagaagattcagcgggcgatcgccaaggcattcctttcggtcgggagtttcgctacgcaggatgtgatcaccaacatcctgagccgggtcagcgtgaccgacggcatctcggtcgaggagatccagaaccaggtggaggtcgcgctcatggccgagcgttactacacggtagccaaggcttatatgctttatcgccagcggcataccgaggatcgggaggtgcgcgacaagttgcagttcctcatggagtactgcgatgcttcgaacgccgcgacaggaagcaagttcgacgccaatgccaacgtggagaacaagaacatggctacgctcatcggcgagctgcccaaatcgaatttcatccgcctgaaccgccgcatgctcaccgaccgcctcaaggagatgtacggcaaggagttggcggacaagtatatcgaaatgctgaacgaccatttcatctacaaaaacgacgaaacttcgctggccaactattgcgcttcgattacgatgtatccctggctcatcggaggaacgatttcgatcgggggcaattcgaaagccccgaccaacctcaagtcattctgcggcggcttcgtgaatatggtttttatcgtgtcgagtatgctcagcggcgcctgcgccacacccgaatttctgatgtatatgaactattttatcggccaggagtacggcaccgactatttcaaacgggcggacgaggtggtcgatctctcgaagaaacggcgcacgatcgacaaggtcatcaccgattgtttcgaacagatcgtctattcgatcaaccagccgaccggagcgcggaatttccaggccgtgttctggaacgtggcttactacgaccgctactatttcgagagcctgttcggaaatttcctcttccccgacggcagcaagcccgactgggagtcgctcagctggctgcaaaagcgtttcatgaagtggttcaaccgcgaacggacccgcaccgtgctgaccttcccggtcgaaacgatggctttactcacggaaaacggtgacgtgaaggacaaggagtggggcgatttcacggccgaaatgtatgccgagggacattcgttctttacctacatgagcgacaatgccgattcgctttcgagctgctgccgcctgcgcaacgaaattacggacaacgggttcagctacacgctcggcgccggaggcgtatcgaccggctcgaagagcgtgctgacgatcaacctgaaccgttgcatccagtacgccgcacgtaagggtatgccctatcagttcttcctcgaggaggtggtcgatctggtgcacaaggtgcagttggcctacaacgagaacctgaaatacatgcagtcgaaggggatgctgcccctgttcgatgcgggctatatcaatatgtcgcgccagtacctcactatcggtgtgaacggactggtcgaagcggccgaatttctcggcattccgatcaacgacaatcccgattacgaacgttttacgcaggaaattctcggaatgatcgaaaagtacaacaagaagtaccgctcgaaggaggtgatgttcaactgcgagatgattccggcggagaacgtgggagtgaagcatgccaaatgggacaagcgcgacggctacaaggtggggcgcgactgttacaacagctatttttacatcgtcgaggacgaatcgctcaacatcgtggacaagttccgactgcacggccgcaaatacatcgagcacctcacgggcggctcggccctgcacatgaacctgcaggaacatttgagccgggagcagtaccgccacctgttgcgcgtggcttcgcaggagggatgcaactatttcacgttcaacatcccgaatacggtctgcaacgattgcgggcatatcgacaagcgcaacctcaaggcgtgtccgaaatgcaacggcaggaatctcgattatctgacccgtatcatcggttatatgaagcgtgtcagcaacttctctcaagctcggcagcaggaggccgcgcgtcgtcactatgctacgcctggccagctttgatgtggtgttccaggagattccgggcgaagtgaccctcgctctgaatctttcggggtgtccgaaccggtgcgccgggtgtcacagtccccatctgtgggaagaggtcggggagccgctggacgataatttgctgaatagtttgttgtcgggatacggaaatgcgattacctgcgtttgttttatgggaggcgatgcagcgcccggcgatgtcgcgcattggagcgcctgtgtgcgggctgcgaccgagggccggctgaagacaggctggtattcggggcgttctgaattggccgcaggtatcgacccgcgcagttttgattatatcaagctgggaccgtatgtcgcacatttgggaggcttggattccgcttcgacgaaccagcggctttaccgggtgacggacggcgaaatgaaggacattacggcggagttgaggaacagggatcgtatgttattgggttaattgaatcatattaaaaggctgcgagggctgtgaacaaatagttcacggccctcgcggtgtattgccgggcggttcggggacctgcatggaacgaccgtcgcgaagtttgtttttcggtttgagaagcccgaaagaattcggtggttcgattccatcgggagctaacaacaaaaagtccccgaaaaggggactttttacttgtgcggtcggtcgcgttatagtccgaactcttgcttgatcagatcgacggcatcgagcttttcccagccgaagaattcgatctcgcgttccacctcgcggccgtcctcccacactttctccttgcgggtgtaggggcggttgccgaaatgtccgtaggatgccgtcgcttcgaagatcgggtttttgaggccgaatttcttcacgatagccgccggacgcaggtcgaagagcttggcgatacggcgggcgatctccccgtcggtcatgtccgcgagcttcggattgcggctgcataccgcaccgtgcgtatcgacgaagacggagatcggttcggcgatcccgatggcatagctcaactccacgagaatttcgtccgcgatcccggccgccaccatgttcttggcgatgtagcgggctgcgtaagctgccgaacggtccaccttcgaggagtccttgcccgagaaggcgccgccgccgtgggcaccgcgtccgccgtagctatcgacgatgatcttgcggcccgtgagtcccgtatctccgtgcgggccgccgatgacgaacttgcccgtgggattcacgtgcaggatatagtcgtcgccgatcagtcgcgccaacttatccttggcgcgttccagacgggccttgacgcgtggaatgaggatcgtgcgcacgtcctcgcggatcttctcctgcatgcgtttttcggccatcttctcggtgacgcccttgctcgtggggatgaaatcgtcgtgctgggtcgaaaccacgatggtatgtacgcgcagcggacggtgcgtctgttcgtcgtattcgatcgttacctgcgacttggcgtcgggacgcaggtaggtcatcacctgcccttcgcggcggatgacggccagttccttgagaatgacgtgcgagaggatgagcgtcgcaggcatgtattcgcgcgtttcgttgcacgcatagccgaacatgatgccctgatcgcccgcgccttgttcttcttcggcctcgcgcacgacaccctggttaatgtccggagactgttcgtggatcgcggagagtacgccgcaggaattaccgtcgaactgatattcgcttttggtataaccgatacggttgattacgcggcgtgttacgtgctggatatcgacgtaggcgctcgaacgcacttcgcccgcgacgacaaccagaccggtggtacagagcgtttcgcaggctactttggagttggggtcgtgacgaaggaattcgtcgagaatggcatcggaaatctgatccgaaactttgtcggggtgtccttcggacacggactccgacgtaaataaaaatcccattttacattttttttggaagttaaacgtataaaatggggaaaaattggctgctggaataaaaaagctgttttagctattttttattgtggtttgcaatcagtcaaatctttccacattccccgccgatcggcgaggactgcaaaggtaaatataaaaaacggggaataaaaacttattccccatattatttgcgaaaaataggtgccgtcttatagggccttggtatctatcgggttacgttcaaggtcggcagattcaggatttgggcccgggtgaattattctgtgtgccgacggcggagttttcgcttcgcgacacgtctaaaagctggaaacacaataatcgtcttttctgggcgttctgtaactaaatagaaacgctcaaacagaaacagcccatgagataaaattgcctccgtaataaaaccagttaaattatttcgatattggattatgaaaaaggcattgttgttattaggtatgattgccgcaggcgccgcatccggcggtgtcgtcgcctggagtattttatcgccggccgaaaagaacggcacgcatgttgttacgccgcagagcggggcagtgtctgacgaccccttttctcaggcgggaacccatttcacttcgtatcaggccgagcagtatccggatcttacgtatgctgccgagaatgctgtcaaggccgtcgtgaatatcgaggtggttcaggagatcgaagttcccgagcggcagtacgatccgtttttcgaatttttcggtattccccagcagggccggcgcggcccttcgacacaggagcgtcggggcggaggatccggcgtgattatttccgcagacggttacatcgtgaccaacaaccatgtggtggacgaggctacgcgccttcgcgtgaagctgagcgacggccgcacgttcgacgccaaggtgatcggtaccgaccccacgacggatgtggcgctggtgaagatcgaggccgaggacctgcctacgttgcctttcggcagttcggattcgctccggttgggcgaatgggtgctggccatcggatcgccctataacctgcaatcgaccattacggccggtatcgtgagtgccaaagcgcgtcagttggatgtcattccgagcgaattccgcatcgagtcgtttatccagacggatgcggccgtcaatcccggtaattcgggcggtgcgttggtcaatacacgcggcgaactggtcggtatcaataccgtaatcaagacgatgacgggcagctatgtcggttattcgttcgcggtccccgaaacgatcgtccgcaaggtggtcgtggatctcaaggagtacggcgtcgtgcagcgggctctgttgggtctggcattccgccccatagatcagaatttcatcgatcagatgggcgaggaaacgggtatcgaggagttgggtggcgtttatgtcgccagtgtgtccgaagggggcgctgcctcgcaggccggtatccgcaagggagatgtgattctttcggtcgatggcgtggagttgaacgaggctgcgacgctgcaggagcagatcggcaagcatcgtcccaccgacaaggtaaaattaatgataaaaaggtcgggttcgatgaaacaaatcgaggtgaccttgcgtaataaagcaggtaagacggaactcctcacgcgggacgacgtcgatgtgatggaagttttgggcggaaagttcgccacggccgatgagcgtctgtgtcgccgactggagatcagaggcggtgtggaagtgctggcaatcaaggcgaacggtattctgtcgaaggcacgggtaagaccgggattcgtgattacccacatcaacgacaagtccgtgcgttcgctctccgatatgcagcggatgaccgataaggttcgcagcatcgacggagtatatcccgacggacgttcggcgagctatgtgcttgtcgaatagggaagcgccaggaaagccgggtatgttttaccgttttttattgccgtagtttaagaacattcttataaaattaaatatgcgtcagttaaaaattacgaagtccatcaccaaccgtgagagcgcgtctttggacaagtacttgcaggaaatcggcaaggaggagctcattacggttgaggaggaggtggaacttgcccagcgaatcaagaagggtgaccaggaggcattggagaagctcaccaaagccaatctgcgtttcgtcgtgtcggtggccaagcagtatcagaatcaaggcctcagtctgcccgacttgattaacgagggaaacctcggtcttatcaaggctgcggagaagttcgacgaaacccggggtttcaagttcatttcgtatgccgtgtggtggattcgtcagtcgatcctgcaagctctggccgagcagtcgcgtatcgtgcgcctgccgctcaatcaggtaggctcgctcaataagatcaacaaggctttcgcccgtttcgagcaggagcacgagcgcaccccttcgcccgaggagttggcgaacgagttggagcttcccaaggagaaggtgaccgatacgctgcgtgtcgccggccgccatgtttcggtggatgcgccttttgtcgacggcgaggacaacagcctgctcgatgtgttggtgaaccccgattcgcccaatgccgacagagggttgattaacgagtcgctctcgaccgaggtggatcgtgccttggaaacgctgaccgagcgcgagcgggatatcatcaaatatttcttcggcatcggctgttcggaaatgacgctcgaagagatcggcgaaaaattcgacctgacgcgcgaacgtgtacgccagatcaaggagaaggcgatccgtcgtctgcgtcactcctcccgcagcaagttgctgaaatcttatctgggatagagaaccccgtttatgataaagccggaactttatgaagttccggcttttttattccatttccgaactttgttttgcaattgtcgccggtgacagtcggtgcggggcgattacctgtcgtcggaatattcgtcttcggtcatcatacgctggatgcgcaggtttttacccaagaccagggtgatggacagcaacgcgagagcacagacggcgcaaagagccagccattcgagccgtcccaatatgcccgatagcaggacccccgctacggatagtgccaggaccgtgtaacagatgacgagagtaatcttaagtggttgcagcatatttttatggtggcgattatattttgcaatgtatccttatccgacggtcgcagcattgaattcgaggggcgctattcgcggcctgtgcccgcatttgcaatgcagccctttctaaatcctcttctcggagagggcttgggtcgctgtgctttcagagaggtactctaacgcgtataatcaggttttagaagttattatgcttaccacaaaatcggtgcctttccgatgctttgcagatattcgttggcccgggaaaagtgtttgctgccgaaaaatccccggtaggccgacagcggggagggatggacggctttgaggatgcagttgcgctggggatcggcgatggcgcctttgcgctgggcgtaacttccccacagcatgtaaacgatgccttgcttgcgctgtgcgatggcccgcacgaccgcatcggtgaaagtttcccagccgtgtcctgcgtgggaggccgcttcgtgcgcccggaccgtcagcacggcattgagtagcagcacgccctgttcggcccagcggtcgaggttgccgctcgtgggaatcggcgagccggtgtcgtcggctacttcctggaagatgttctgcagcgagggtgggaacggcacgccgtccgccacggagaaacagagtccgttggcctgtccttcgccgtgataggggtcctgtccgatgattaccactttgagtttgtcgaacgggcatttgtcgaaggcacgaaaaatgttgcttcctctggggaatatccggcgggaagcgtattcttgccgtacgaagtcggtgagttctcggaaatagggtttttcgaactcttcggaaagaatctctttccagtccgaagcgattttaacatccatggctggtattgaattaggctgttatatatttcgagtaccacgaccgttttttgttgatctcggcaggcagccctcgatcctgcggggtgtcgtttcgttctgaccttcttcccgggaagagtttcgacttttcgtcgaagcatgtcggtcggtttcgagccggagcaggtcggtaatcgagctatataatcaggttaaatttttgctaaaatacaaagaaagttcgaaacggcgtgtcggaaatgcgtaaatttgaaaagtggcatcaaaagaatatatattatttgttatgaaaaaaattgtaattaccatgctcgtcctgttgtcggcggcctatgccgtcgggataggaggcggggaggtcgcccgtaaactgaaccttcgaccgtcgcaaatcgttcccgcagccgacacgttgccggttcggaacctgatctatctgatcggggacggtatgggattgagtcacgtgtcgatgttgatgctcgaggagggatacggtacgaccgctttcgaccgggcgcagaacatcgcattgattactacttattcagccaacaaccgggtgacggactccgcagcggccggtacggcgctggcgacgagacataagaccggcaacggtatgctcggtgtgctgcccgattcgacggctgcggagtcgattatggcggatgcgatccgagccgggatgccgaccggagtcgtcgttaccagtactctgcaacacgctacgcccggcgctttctatgcccatgtaccttatcggcgacagtatcagcgaatttccgatcaactggccggaagcgacttgacggtggccttcggcggcggattgaagtatgccgaagcgtcggagcgggaggacggtgtaccgggcatcgagcgccttcgggatcgcggtttccgggtgctgaccgatccctcacagctcgataccttgagccggggacctgtgatgggattctttgccgacggtcacctgccgaaaatgtcggagggtcggggcgattatctggagcgggcgacccgcaaggcgctggagattctgtcgcgagaagccggcgagcgcgaccggggctttattctgatggtcgaaggatcccagatcgatctgcgggcacacgataacgatgccgaaggcgtcctggcggagatgcgtgatttcgaccgggcggttgccgctgcgatggatttcgccgaccggcatcctgggacgctcgtggtcgttacggccgatcacgaaacgggcggtctttcgattccttcggccgatgtcgatttcgagcacgaggaggccgggatcgagtaccgtttcagcaccggcggacatacggcggcgatggtgcccgtctatctgtacgggacaggctccgaacggattaacggcgtactggacaacacggagctggcccgtatgttgaaatggctggtattgccggatagcggacggattgcgaatgtgcccgattgattcggatgtacgggaagtccgcaggaccggagagaaaaagcgcggggtgttgtgatcgacaccctgcgctgtaatttatggcattgcgtttcggtttttccgtgcttcttcgttgtccttctcgtccgtgtcgtcgccttcccagtcgaacggcgggaaatcgcgtcgttcacccagcgagaagcgggtgtaggtgatcggcagcttccgttcgaggaacatctgttcgtaggcggtcttgaccgagagtatttcgtccgcgaaccccgagccgtagatgtcgttgttggccacgtcgcagggcagaccgaaccgttcgatcacggcttgcgtgtaggcgtagaggtgttgcgagtcggtcttgaggttgattcgtccgccgggaacctgcatctgtgcgtactggcccaggaagaggggtgaggtgagccgtttcttggcccggcgcgatttgagctgcggatcggggaaggtgatccagatctcatcgacctctccttcggcgaagaaggaggcgatcatttcgatgcgggtacgcagaaaaccgacgttgcgcatttgccgttccgtggcggttttggctccgcgccacatgcgggcacccttgatgtcgataccgatgaagttgcggttggggtcgcgctccgcgagtgcgacggtgtattcgcccttgccgcagcccagttcgagtacgatcggacggtcgttatggaaaaagtcgctgtgccaatgtcctttgagcggatggtcgcggcggaaggcctcctcgaaggcgggttgtacgaaacattcgaacgtgaggttctccgcaaagcgtctgagtttgtctttgcccatctgtttttattcgcttttttgctggttgatgccgatggcttccacgccccggaccggcatcgccggggtgaaagccatcctgtaaatgccgctgtcgggaaaaattacgtgccgacgatagggaaccgacgcttcctccgcgagggctgccgggtgcctgcggggaggaaggcccagcgtgtaggattcctcgaaaaccagggagtcgggcgaaatggtccgtatcgtcagccgcagcgtgtcgtcccgaaaggagtcgttgtaacgcacgacgatgtataggtcgcgcggggtcacggtatccgcgttcggaatttcgatttcggcactttcgctccacgtgccgcccccggtatcggttacgaccgtctgatgcggcgaaaggcagctcgtaacgagcattccggcgatcgctatgatactccgcaggtacattacgagtcgttattgctcttttttcggcggttcgggttgtgctgtctctccgtttccgccttcccgacggttgccttcacgacggttgcgtcctccgcgtccccgaggacggcggcgggcaccgttctgtccctcttcgcccggagattgggagtgtgtcggagtcggatcggtttcggagccgttttgtcccggacggttttcggaacgagaacgctccgaacgacgttccccgcgctgttcgctgcgagagccctgaccgttgccgcgttcaccgttctgttcgccggaggtgttcccgcgttcggtgcgctgttcgtttttctgggtgctttgtccgtttcgcggcccgttccggtcgctgttgcgtgggttgtgcggttcgccctgaccgttattccgttctccgcgcgattcgcggccttcgccttgtccgtttcgattattccgttcacggcggtcgcgtttttcgcggcgttcactccggttggctgcattttcctgtttttcgtccttgcgggattccgaaacggcggacgcttctgcggcgctttcgttgcgggcaccgttgttgttccggttttcgcgttcttctgcccgatcgccgcgacgccggttgcggcccttgcgtttggagccgttgccgtcgaagcgtgtgatgctgccttcctccgagcggtaggtcggttcttcgaacttctcccgttgtggttgctccgccgacagctgatcgaccttcttgccggcacggttcagcgcgatgatctccttgacgcgggcgacgggaagcgtcaccacgttggtcatcgtatccttgctgctgctgaaggacatggtaccggccaggatgtcggttttgaccaggtaatattcgccgtcgagagcctggagcggttcccgcagacggggaaactccttgcgggcgtccacgtaggtatcgtattcgtaggcgaggcagcacttgagtttcgagcactgtccggccagtttctgggggttgagggagatctcctgcatacgggccgagttggtcgtcacgctcgagaagttcgagatccacgatgcgcaacacagctcgcggccgcaggctccgatgccgccgatgcgtcccgcttcctgccgggcgccgatctgtttcatttcgatgcggatgtgaaaccgctcggcgaagaccttgatcagctcgcggaagtccacgcgctcgtcggcgatgtagtagaagatcgccttgatcttgtcgccctggtactccacgtcgccgatcttcatattgagtcccatttcggcggcgatctggcgtgcggcgatcatcgtttcgtgctccagagcgatggcctcctgccagcgttcgatgtcgtagggtttggccttgcggtaaatcttcttgaattcgccgttgtaggggttaaaacccacgcggcgcatctggcgggctaccatgtcgcccgtcagggaaacgatgccgatgtcgtgtcccggcgaagcctccacagcgacgatgtcgccccgttccagcggcagattattgacgttctgatagtaggagcgccgggtgttcttgaagcgcacttcgaaaatatcggtcggcgtgtgtggcgggtattgctccagccaggctgtttcgtgcagtttgtagcacccctcgcagggcttggctgcgaccccttcgggggcgtagtagaacgtgcagccgcgaccgatttctggcttgggcgctttcgtatatggtttggtgttatccattggagtcataaatttcggtaaagatagtgaaatccgggagcaatgccaaatttattcggctgagactccggcatattcccgtcgggcggacgtgcgtcgctgccgggaagcggagatcccggattatcggatgccggccttccagcgccggatgtcgcggcggtagcggacgatcagcagtacggcggccgtcgtaagaccgacggtgaagcccaggatcagcccctgtgcccccattcccaatgtaaagcccagcaggtaacccaccggcaggttgaatacgatgtacgagaggaaggcgatcggcatgatgatcttcacgtcctgaataccccgcaggatgccgaccgaaacgttttggatgccgtccgccaactggtaaacggcgatcagcaggatcagcttcgaggccaggtcgatcacttcggcgttggtggtgaagaaagtcggaatgacgttgcagagcgagatgaacgtgatggcggcgaagaggttccaggcgatgaccaggtggtaggaggcctttgccgccagagtcagctccttcaagctgcgggcgccgtagcagtgggagatgcggatggtcgtggcggcaccgatcgaagttacgatcatgaaggcgcagttgcccagggtcatggcgatctggttggcgctgatggccgtcttgctcagccagcccatcatgatactggtgccgacgaaggccgaggcttcgagaaacatctgcagggagattggaaggcccatacgcagcaatgtgcggatcgttttgaccgaatagttgcggggcgagaatccctgaagataggcgcggtatttctgttttttgtagaaatagccgataatcatgatcggcatggcgatgcgcgatccgagggtgccgagccccgcacccgtggcacccagttcttcgaatccgaggtggccgtagatgaaaatccagttcaagccgacgttcatcaggttgcagagaatcaccacgaccatttcgacccgggtgtttccgacgccttcgaggaactgcttgaaggtaaagaaaagcatgatgaacggcatgctgtaagccagcaacttgtaatacggtatggccatatcgaccacttcgacgggctgtcccatgtggtacatcaaagggatgacggccagttggaggccgcagaccaggaatcccagcaatgtgtagaacatcacgccgttttgcaggtattgcgacgatttgtgtcggtcgccctgggcgtagagttcgccgatcagcggcgtgaggcccaatgcgatgccgacgccggcgatgaagaggatgaagaagaccgagccgccgaacgaagtggcggccagcggcgtggggtcgtcgcctccgtaacggccgaccatgacgttgtcggcgacctgtacgaggatctgccccaactgggtcatcacgacgggcagggccagtttcagattggctttgtattgttgtttgtaggttgaaaaacggtacatatttcttgaatcagacgacaaaggtacgaaaataatcggttatccctctttcgcatccgtttcgaaagggggacgggggctgatgtatggacctttcgaccgggtgtcggggccgattttgcaggcagatattgaaagcatgcgggacggacatatatggggtttgtttccgatttcgatgcaaatgccttgctgccgggaggtctgtttggggttattccgttatgtcgggccggggttgttgtcggttctggaaaaccgcttcgtcgaaggagtgggtgaggcgtgaaaatcccggccgatatttgcttcggccgggattcgaaaaccgtccgccactggtgcggatttatgttaggcgacccggagaatcacctccttttcgccgtcgggttccacgatcacccgctccccgctgtgcagtttgccgtcgataatcagtcccgagagaggttcctcgatgcgttcgagcagcgtgcggcgtagggcgcggacgccgtatttgcgctggtagccgatggcggcaagggtccgcttcgcctcgtcggtgatttcgaccttgtagccgagtcggtcggtacgggagagcagctccttgagttccaggtcgatgatccgctccacgtccgagaggtcgagcgtgcggaagatgacgatgtcgtcgatgcggttcaggaactccggtgcgaaggtttcttccagcgcccggcggtattccgactgcggggctttctgctgggtgtccgatttcgaacaggtgctgtacccgacctgcgtggagcgtattgccgcggcccgcgatccgacgttggaggtgagaatgattaccgtatttcggaaatcgaccttgcgccccgaaccgtcggtgaggtgtccctcgtcgaagatctgcaacagggtgttgaagacttcggggtgggctttctcgatttcgtcgaacaggacgaccgaatagggatggcggcgtaccgcttcggtgagctgtccgccttcgccgtagccgacatatcccggcggggagccgatcaaccgtgcgacgttgtgtttttcgctgtattcgctcatgtcgatacggatgagtcccttgttctcgtcgaagagccatttggagagctctttcgccagcagggttttgcccacgcccgtcggtccgacgaacatgaagacgccgatcggacgcccttcgtccttgagtcccgcccgggagcgttggatcgaccgcgaaatcttttcgacggcttcgcattggccgatgacgcgggccgaaagatagtccgcaaggccgcgcagacgttcgctttcgctgcccgagagccgttcggctgggattcccgtcatggaggtaataacctgctcgatatgctcggcccggatttcgggcgggccgggatcggacggaagagtccatacggcgccaccgacagtcgtcgtgtccgctgccgccgttttgcgggagcggtttttgggcgttttggctcctgctgcggcgccgaccggttcgcgggatgcggtttttcgggacggtttttcggttttgcctttgtcctgcaggtgaatacgtgccccggcttcgtccagcacgtcgatcgccttgtccggaaagttgcggtcggtaatgtagcgcccggtcagggcgacgcaggcccgcaatgcttcgtccgagtagcgcactccgtggtgccgttcgtaatggggtgcgatgttgtgcaggatttgcagggtttcctcttccgaagcgggttcgacgaggattttctgaaagcggcgttccagcgcgggatcgctctcgatatcttcgcgatattcgtccagcgtcgtggctccgatgacctgcaattcgccccgcgccagggcgggtttgagaatgttggccgtgtcgaggcttccctgggtcgaacctgcgcccgcgatggtgtgtatttcgtcgatgaagaggatcgagtcctgcttcctgcgcaattcttcgagaagtcgctgcatccgttcttcgaactcacctctgtatttggtcccggccaggagcgacgatacgtcgagcgaatagagccgtttgccgcggatggtggcgggaacttcgtccgctgccatccgcagggccagcccttcgacgatggcgctcttgcccacgccggcttcgccgatcaggatcgggttgttcttcttgcggcgcgagaggatctgcacgatgcgttccatctcccgctcgcgtcctacgacgggatcgatgcggcctctgcgagcttcgtacgtaaggtcggtgccgaatttgtccaacaaggcaggttccgcaggaggagtgtcccggacaggttcgcgcaggccgatgaaccgtagttcgggtgtcggccgaaaattggtatccggaggcgtcgtttgatcggcctccagggtcatcttttgcagttcggtcgctatcgcctgtgcatcgaaatggtacatggccagcacctgcgaagtgatcgtgtgcgggtcgctcacgatgtgcagcagtgcgtgtgccgtcgaaacatggtgcatcggggcgaacaatcgttgtaattctctggtgtataaagggaaaaattcttcgggattctgcctcgatgaatcgggtgccgataccgaccgaatctcgctttcgatgcgaaggcatatttggtgaatctcccagtccttgaggcgggaggtgagtatctgatgcgctaaggacccttcttcccgcagaatctcaagggtgagaaaatccttgagtgagtgggtaatagcgcgtttcgaggtttcgaatgccgtacgggcgatgatggcctcgagcgtttttgagattttagcttgcatcttggattccttttttagttttccgtgttcggaaaagcgaacgcggtcgctctctcctcgcttgtcgaaaatgtacgttttgtcctgttaaaattacagacttataacgacggaatcccagataatattatgttaaataaaaatattgcatattgaacgatttcgtccctttatcaagcgccgggacgaggccattcgccgatttccatgtcgcggatgtcggtgccgtcgatggtgaagcgcagggcgctgcgcaccttgtggaaaccgtagcagccggcagcgccggggttgaggtgaagcaggtcgtaaacggggtcgtagatgaccttgagaatgtgggagtgccccgcgatgaagattttcgggcgcagcgattggatccgcgctacggcctgcggggtgtagtggcggggatagccgccgatgtgggtcatcaggacgctcaccccttcgcactcgaaggagagaaattcacggtaggtgcgtcgcatgatacctccgtcgatattgccatagacggcccgcaggggtttgaacgccgcgatctggtcggcgacctccggagagccgatgtccccggcgtgccagatttcgtccacgtccttgaggaatgttttgagcgtttggtcgaacgtgccgtgggtgtcggatatgagtcctatgcgtttcatgctattttgttgttctctgtattcttcggtaaactgccggcgaagtttgtgtttcattcggattcctgcctgccgaatttacgccgcccgcccagcaggtagagcgtgccgacgacggcggcagcaaaggctgccgtactgtccgcaagaagagcgcagcccgtcacggccatttccgcaacgcccgcgacggcccgcagcaggaagagggtggcaatggtgtaaatacctgtttcgagcagcggcagccggcggatgatcccggcgcccgaaagtccgtagaggccgaatacggcgaagatgaacgcaatggcgacggtcagcagataaggaatggcggccccgtagcggagggccagcgtttccatgattccgtcgatgcgatagatcgacagtacgggatagagccaaggtaggcaggcgaggtgtcccgccgcgaccaggaaattcaatatagcgcctgttttcaacatgtcggcagtctttatgtttccggggatagattccgtcccggtttcgggatttatgattcagggattgcccgctgtgctcttttgccgtttgtcggtatattttggtcgcttgtgtcgctgccgttcgccggggtgaaatacgggatgtcgtccgatcgtattttcggggctgtccggcagtcggcttcaggaatgccggaaggcgttgtgtctccggctgttatttatatttgtccttccacagctcccggatgcatgcggcgatcttcgcttcggcggcgttgcgggtgttcggctcgtagaatttcttgcctttgagcgtttcgggcatgaactccagcccggcgaatccgccgtagtcgtgggcgtatttatagcctttgccgtaccccgcctgatccatcagcttggtcggggcgttgcgcaggtgcaggggtacgggccggttggtcgtatcgtgttcgacgaaggagagcgcctggttgatggccatgtaggccgagttgctcttgggcgaggtggccaggtagatcgtggtttcggccagcgtgatgcgggcttcgggcatgccgatcttgtgcaccgtgtcgaaacaggcgttggccagcagcagggcgttgggattggccaggccgatgtcttccgaggccaggatcaccagccggcgggcgatgaagcgcggctcttcgcctccggccagcatgcgggccaggtagtagatcgctgcgttgggatcgctgccccgcaccgatttgataaaggccgagatcacgtcgtagtgctgttcgccgttcttgtcgtagagggcgatgttctgctgcagacagtcggtgacgtattggttggtgatcgttactttgccgtctgcggcgcccgtgatgatgtccagaatgttgagcagctttcgggcgtcgccgcccgaaaagcggaacagcgcttcggtttcctgtacctcgatctcccgggttttgagctccggatcggtggccagagcccggtctaaaagggtttgcagttccccgtcggtcatcggctggaggatatagacctggcagcggctcaacagcggtgagatcacctcgaacgagggattttcggtcgtagctccgatcagcgtcaccacgccctgctcgacagcacccagcagcgagtcctgctgcgacttgttgaagcggtggatttcgtcgatgaacaggatcggcggtttggagtcgaagaatttctgcttgcgggccgattccaacacctcgcgcacctccttgacgcccgacgtgacggccgacagggtgtagaacgggcgtttgagagtcgtggcaacgatcttggccagcgtagtctttcccacgcccggcggaccccagaggatgaacgaggggacattgcccgtttcgaggaacttgcggaatacgccgttctgcccgaccaagtgggcctgtccgatatattcatcgagcgtacggggacgcagtcgttcggcgaggggaatggacatggaaagcatttttttgtcgctcaaatgtactgaaaatttttgttttcggcaacggccggactgaatgcggtccgaaagagcggatgcgtagaaccgctgccgtccggttcggggattagcagcggggagatcgtgtcttggccggatttcgtttctacgtcgtgcttcacgcttgttctgcggtcgcagttcccgacgcgatgcgctattgtatatttcgaaaaggatcgctatatttgccgtacatattgatacacacggaaaagtgtaagtctgttcccgaatcgtgaacgtaggaaattcattttggcggagaataggcagacatcttctcgcgtcgtattcgtattctgcggatataggcgtggggctgtcgcttatttcacgccaaaaggtactcctacgacctgcgattctgaaatgggcttcggtgccacgcttgaaccgaatattgcaaaatatcaatctgattatcaaatattaacatcggaaatcgtatgataatgataccatatagttcccgatatttgtgaggattagcctattctttcttgtgcaacctcaatggcttttcgctttaattcgtcttcatcttctatagcatccaatactttgtctgccagccatagtgtaagaagttcatttttatcaatattgaaatactcagctaattgtattacttgtgtccgtttggcatatctatcgccacgctctattttgctaaacattggagtgtctatatcaagcaaagctgccaattgcctttgtagcacaccgtgttcttctctcaactcttttattttgtctcctaataacatggtctttattcttttcagttcagtatgtattttcgtcgaaattcgatggatttaaacatttttgacggaataggctgtcattatccgctataatatgacggaatccgttataaattccgctataattagcgaaaaccgctatatctgttgtggttattctttcaagaaccaagttcgcccattagcaaaaataagtttatctacacttagagcattaagaatgtctcctaatatcctcaattgctgttcccgtgttttagcttgcggcattacatctttgatgtattcgtagatgccatcacgtttggcgccatctgatcctgcattcttaagatattgcaaaaccatttgtttaattttgtccttatcaagtcctttttgcttggtgtaaccttgcaattgacgagtagctttagcaactcctaaagaaattgtataattgggagcatcgccctcaataagtcccctgttcagcaagtcttttgcaacatcttcatgtatgaatctgcctttctgtacagcgtcgagagatatgcaatcccataatgacagagtgttgtcggtcttcaataaatccgtatatcgcttattgatctcgttaccatatatgcgtactacaaccttctttttcgccgcatcaatctcgtagtccggcatcggaaagtgtctgcgccattgttcattaaacattttcttgatgccacgacttacggtatcaatcatattgaagtccaccattgccttgcataggcattcattgcggaaataggtctgagattcctcatttctcaaagcattttccaaagttccggggatgaaagtaccggcgttggaataatatagatagccgggattctcaacgaaattgacacgctgttgcatcgtgtaatcttgatgagcaatacagttatgaagtgcttcgcgtatagtgtagtcatcatactgcttcattgtatctgggaaaagcgtaccaccaggcatttcacgcaaagtcagattttcaatctttgagagaatttcatctactgtcagtatgaatggaacagtgaaatgttcgtagtcaaccacatcttgatttgcatccctgcgtgtccaggttacctgagcgacaacagggcgcagtttaaaggctgattcgtatttgcctaacaatatgatagcggcacgagtgatgcttccatttcttgttagtccgcatttgccaagaaatgtctgaatatcccaagcatttacctcggattcgggaatacggctatgtaccttcttaaacattttgcgggctttagctatagcaacttcgtcaaggtcatctatcgttgcatcaggaacaatctgtgcagaccaatctgtttcaccaaatattggctcatcaagaatgacattcatgcgttcagtggtcaactctacaagagaatcttcaattcgctgccatgctttgttatgagcgtaaacaggcaatttgggacgatgcttgggaatatgtattacccaaactttcttgttagtgtcatcggtaacaaactcttcaatatcgagaccttctgtcgaaagattaacacatcgttccgttaaacgaagaattgccttttgccagtcataattataggtatccgtcccgacaatttccaaagaactgtcatgtacccctatcactaaatgtcctccttccatattggcaatagccgacacatatgagatgacatcgtttttctcatccccacagaacgagttcttcaaattcttgaattccttccattcgcaacgagcattctcttgtggatagttgcgaaggagatattgttgtagttctgactcttgcataattacccaattatactttcactttcatcattatgtttctcagcatttcggatgacgcattctttacttgtattggcatagcagtagacacagaaatgacgacaagtattatacatgccgatgtccttgctgaccatacatccacataccttacgttgccctgtatcctttacattacgcaccttctctggtattggtggcaaattaccaaacaagtctttttctggtaatttcaatgtatgtagataatagacaagttccttatcgtcagcaaaaatgcgtttcatcaattcgccatcaatgcaacgattgtgttctatcccgtatttttcaaggtcaatattttcagcacaagtggcgatttcaacatcccaaccatctttgtgccaagcttcacgaatcttttgaagaccttctacaatttctattcgttgagcaaggttggcttcggcattctccacattctcctttgtaaagagcatactttccttaacaagattgttttgaaccttgcgatatgcttttacatcaacgaaactgaatacaagcttatttgtgtaacctttcagtttatttccaatgcgccaaatgcgcgtcaagaggtcacgaggagcaatgtttggcgtaattattaaaggatcaaaacgccagattactttctccttaccaatcatatcagaaagtttcttgaatgtctcaactctgttttcgacagacgaaacattaggctcaaaaccttcttttacataatcgttgagtgtaacctgaaagtagtagtgtattcctttttcgtcaagctcatgaaggtatgggagaatcggctttgggttttttgtccagaaaatcaccaccttgcagtttttgaacgaaatatacattttctgctggttgaacggattataccaagcacaataccctttagccaagcggttgaagaaccacttggcataaaaggcaggaatatcggttgaacgacttgcagagacaatgacaggagctgtagcttctacttgttcacctgtatcgttcgtgataataattttacctattggcataacgattaaataaatcttgcattaactgctcaaagtactgtttattctcataagttccctctacgataggaggataaccacctttatcataaaaacaccaatgcttaaaatgatcaatggttgatctattatctgtagggttatccaatggattagaacagtatttaccaccaggagcataacctttttgaaatgttattacctttctggaaagcgtttctcgcatttttataggtaggtagtttcttgaaaggataaaatagttaacatttgcatcctctacaaatttagatgatgttggatgtattggtttcaggtttcgcttttcaacaccaccctgcgaaataactttatttccttgtggttgtggatgcgaagtcgtatttaaacttttaatacttgaaattagtttctcaatcttcttatacgcagcatcagttggtttcaagaagttgtcaaggatgctcaagaacgcttctggatcttgccttttactctcaagttctatagctttatcaatattttctttttgggtctttaagccttccttacctacaatcgaataaattttactacggaattgttctggtgtataagagccctcatctcctgcaaaattaacagcatcaagagctttgtacgctttagttgtagtaatacgtgagaaactactaaaaatatacataaaagctttaggactttgaactatattttcaagttcaacagccttatttattgcctcaacaactttctgctgttttacaacttttgactctacattatttagattctcaataatcttagatcccaactgactttctacaataactgaagtattattgctcgcttttggtaagactgcatcctttatttctactccattaagcattcgccaaacattacttgcaaatgattgataataatccttattgccattaatcaatacagacgtaaatgtctttggcagagacgtaaaacctcttgtggcaccatagatgccataagctaacttataattacagaatcctacttgtacaaggtactctaccaagcgatcaatgttatcgcctttctgacagaatgcagcaaacgatgaaagtacatcattttcaatagcgaataagtcaaaggcggagttctcctgaaaatgattaagtaatgctccaacataagcagatgcaggatttgagtcccatttatctccaagcatgttccttagaatcatacctccattatatgcctgtgccaaaggttcttctacgccattttcttccattacagatttgtactctgccataaactgggagcaaataaggttcttatagaaagaactttggtaagatgtgtccaaaatatgcaaagacagattatcatcaacattcagcaattcctcaatggcatacttttcacgttgagcattatcttttgcttccaatttacgaatggcgctattcatattgtctgtgacacgagaaaacgtctctggggaaacatactctaaacaactccacaattcgtttgcatcatagactctacgaagaggaagtttgttacagaatgcgtcataaacaccccagtagtgcaaaagattcttggcatcttttgtagaaagaccttgcggattgtcagacaattttaactctaataaatttttgttccaaatggtatcttcatctattgaagaatagatttcattaaacactctgattccattcaagatagcatcgtcttgtgcctgagtgggtcttttatcaggagaatttacaacagcagaaagcgtgttacgaagttttcttgataaagctttcaatttgccaacctcgttgctgaccgagctattagcacctattagataacaataaatgaaacctttaattctgtctagcagaacgtctctactaacatctataggttcattcttgatcttgaaatttacatataaaggattccataagaaatcatctttttcagattgagtaaataaatctttggcaacgccaaaaaatgtttttttctctttgggtttaacacctatgttaggagcataaagcttatagaacttattctccagactttgttctgcctttgacaatacaccctgacgctcctgataactattaaaatagatacgacaatgaaaagggttaaggttgatggtatgatagcagagataggcctctactccgtcatgttccttagccttctcaaagaatccatctttatagtcatcagtttctatctcaataaccataggatagttctcaaggtcattttcttcaatctcgaaccttggatatttactgtacaatattattacttggtctttgtcgttcgcgcagacaggatagaagcgtttgttaccaaagccgcgtcttgcgtaaaatcctaagggcgaaattgactctgaagacaatatgttattgaaattcagagtacaggttggtatgtataatttcataattatcctcgttttttaggagttgacaaacctcatagtgttaatttgggaccgctcgtaagactcgtatcataaagcgaagtaggtacatcatcaaaaagactggaaagattgcctgagtgcattatatacaaagcacgataggttcttgttacggccacatatagtggatttcggtttgcatcgtcttcaacagtacattcaggaatgaaaacatgttcaaattgaagtcctttagaactatggtaggtcatcatctttggattgtctgaagaaaaatctagatccataaactgtccatacttagcttcaacgttaagaccatgattcttgaaatattcatatgcacgctctacttcatcattgtgtctaaataggatgccgacatcctccatgtttttgttttgaataagcgaaatgatggcatcatactgttcagtaatgttattgtacttgataatctttggcttttcaacaccctcttcagtacaacgctcttcaagttcgtcactttcggaatttagatactgtgcaagacgggctatctttttgggtaatcgatgattgaacacaagctgttcgacagggaacttagtaaaatactgtatatcctccattgaaacagtttgcttatctttaataaaagtataaagttgttgagccgaatcaccatacaacaataatgctttttttgccttagaacggaatagttctatatcctctctttggaaaaatcttgtgcttcatccacaataatataatcagcacttggacatccagctctattctgccaatgccaatgataatcaacatttcgttgtggaatacctacctgtgaaatgccatcagccatatattgcattagtgctttagtgaacacaatgtaaagataggtacccttatgctcatcttgtatttgttttgccttccacaaggcaagaatggactttccgctaccagcacaccctttaacaatgtaggagttatctgttttcttgttaatcacctttacctggtaatcatcaagttcggaatctttaacgtaaaaacttctcttagccatgattagatttatagatttatgttaaaactatcaattattattttattgtttttagatcgactgcaaattgccaaatcatcattttgcttgtatttggtggggtgtatgacgtggataaggtttgctgtttccatcccttgcatgatagctgtcttaagcggtttcttacacagcactcgataacacaccctgctttcgtcatttgatttgtgagaatgacttacgctgaatgtttgctgcataaagcaaaagtctctacatccatcatgacaagcacacgacaacggtagaagcgtctcaatggttctgcttttacaaacatagtcatttattgtattattcatcaattgaggatagaagtatcctgaatgttcgtctttagttgttacatcaagcattataagcaaaccattttcatgaagaaaagccgtaagtttctttgccattattgcgtatgcatttattggtaggacttctttagaaattaactcacaaaccatcttgtcacagaggataaaatgataatcgttctttccgaatgcaagtttttccacgtcttcaatagagcctaatgtttggctaaatgtagttagttcgacttgtatatttttattagggttacactctactaaatccttgagtatggctaaagcaccatcattgccatctattgctgtgatgcttatctttgtatgaggtaaatgtcttccaattgctgtaatcaagccaagaatttccccacccgtaccgcaaccgtaatccaatacactaatctcatcttgttccaacgttttcttcaggcatttattctgcaaaagattatcagcaatacaaaacatttctgcataactgcgaggaaagtaagtaccaagatagactttaagttcttcttcgttgagatcaagattatactcataacgctcatgctctggagcataaatagcttgatggtcattgaaaatctttttgtcaagccaatgtggcagaatcgtctttgactttcggaaacaaacgttcgaattagtatttgatagttcttttgattgatgttcttcgacaacgccagatgaattgtcactttcggttgcaattctctcgccttcttcccaaaagattgtagaaggtgaaatggctttaacagcatgattaatgaactttgcgagttttgcacaatgttcaccgatgccatctgcatttattgtcacaacatattcttgagttaaccttattccgtgtgctgcaaaagatgaagatgcccttgtgctgtcaagcaccttgactgtaaaattgtcgagcttgagcgataattttactatccttttcacaaaattcgaaagtgcaatactattttcgtcctcgacaacaaaagaatcaaagtttaacattacctcttttttcttttgttttttctcttcagtgtggggctcgtacttctttatatcttcgatcaactctattttctcaattggctctgctggtttatcataagtagcattgctgaattccgtcaggtagaaaggatttaggttgagagtttccgcaagtttaacgattccgagtggggcaaggtcggtgtgaggacaagtgatgtcatccaacttttcaatgaaatgttcgctatcagtaatgtgaagccaagacctgttggtggcacttaaattgttctccaactctattggttgatgaaaaataataaggtgtggcacgtccttgatttggttctttacaacacctaagactttaagttctttctttaccgtggaatgatttatcctagcttgttgaagaacagtctttctcgaacctcccttaataattttaccattgcatgtccattctccattttcattggcaacaacattacctccataatttttgaattctatagaaataatagcgtccttctttataaagagggcatctaactcacatccaatattatagttgcctgcgaacacacagaattcattcgaatcctcatagtgagttttgagttgctcacagagaaaccgaaactgctcacgttctgctgttgtgtcaaagtttccgactctgaatgttaaaagtcctcccattacaaaatatcaatgctatttatgtaaactaaatgatctttatttctgtactgactttttcgattaagaattgtcagtttttgactacaaaagtacataaaatatagcaaatacttgtatgtatagatatgaatttgcaataaatatatttactataaatcaactatcttcgtttaatcgaagtatgcttctttgctacgttatcattccacggaaggtcagacgatgagccaccagttcctgtcccgacatgaacctccgccggtcctccggcggcaagggtgaaaacagcgcccagcaattccgcctgttttccgtttacctgttcctgcggatcgaatacagcgttgacaaactcctcgtccgtgatttcgccgttaaaatgcttttgggccgtatcatagtctatctggaatttgatattctcaaaaagttcctctccgacccgtgtccagatatggagcgacggattccgatagtttgagacattgatacgtacaagattggcaccggatgagaggctgtaatgctgaggattggccttgcggtcaagcaaacttatctgctttcgcagcctgtctatgactgtatctttctcttttgactgctgttctgcctcttcagcttgctgaatggccttgtctatttctttttgatagccatttcgtagttttccgatttctgatttatgttgttcctgcaaccatgccttttctgcctgaagctccttgagccgtttgttgagcctggcaatctcttcgtccttgttcgagagttctttctttgctctggcaaggtctcccttgccgaaccacgagaggatggtgttcctgccctcctgcgccttctccacatctgcctgcaacttggctatgtcctcctcataacggatgacctgctgcctgtaataatccgaattggcctgatgtttggcggtggagccgacaatgccccgctgcagcccgaacggtttcatggtcttggcataactgttctgatattcgtgtagcttggtgcgccgcatcacatcatctgccgataagcgtgccccggatttcgtttcatactttttctcgccctctcgctttttacgaagtcgttcagtggttacaataggtacgatagtggcatgtaggtgcggagttttctcatccaagtgcagcacacatgatacaagattctcacttccgaaagtgtcttttagccatttcatattggcatctatccatttatccaacttgccatcatcggcaatcttcatcatctgctcatgtgttccggtcaggatgatgcggatagctttcgtctgattcttgccgactttacgatgtagtccggcatggtctattctgaattgtatggcttccgtcctgttttttactccatctggaaatttaaccaattcccgattaagatgtgtcctgttcgcatcggcattgaaaggtatatacttcttccccttggcatcctttctttctatatggcatgacataccggagtcattaccgctgccacgttgcaggtgacagactgcatattgtgtattacccatatatctttcgtttatgctgttattactctgattattggtttgtaaaatcccgtcctacgtgccgcagacaaccgggtgtcgagagggtatcccttcgcttatgggctttttgactgccactcggagagtgaaagcggtgaaaatgccctaataagctacgggattttacaaacccttttacacagacagcaagctgtccgattctcttgtcgctctactcctgcattgcatccataagttccaagtcgaatgtatctatcaaggtctgcaatgcagggttgcgttctatcatcttctgtaggatcatctgcggcgtatcttccatcagaaggaaatctgcaatgtccaatccctgactgcgctgttcatcggtcgccatcttctccaacaggtcggaacaagtggcacgcttgcagacggattgcagcatcgggactttgcgccgccattcttccgtagccttcaggtcgggaaatagaatcacttcccggcctctcaacacctgcatggctttgctgttgaagcatccgtgcataccacctgtagcaagccagatgaagtccggaatgaactgggcggcaaccaaagccgtcttctcgctctcgacaatggcgacagtccttgtcgaggatgaggcatcagccaacagatgttcaccgaacagacattgcttcatatggaagtccggtatctttttgaccgaatgtacccagcttacctgattgaacggatgcttgattcgatgcccggtcttagcatcataacccataatcttgcctgcccgcacattaccgttgatgtctatctgccagaaaacggttgccccgttccacatcttggatgtaccgaccttataaagattgaacagcctgtcagtcttctccttgcctgccactttggttagatatcggtataaagggttgacgtcaaacttctgcatggactggctaacccaatcagagggaagataagaagtctgtggtgcagaactagataatggcttcgctattggcttgacggctcttgatggggtgtcgcttctgttgttttgttcaatcatggtttctttgatggttggattatcctgaaaatacttcttcggggtataatggtagccacagctgttgatatgatcacatttgcccacatggttagggaatgtaatttgcgcattcccgtcaacatatcgggtaaaacaggactttctgccgcactttgggcaaactgttttactgcccggtctgtatttttgaagatggaatctgtactcactcataatgctttcgtttttgattactgcaaatccgaaagaccatttgcagtctgcagtccttgcagctttgcaggaaaacatcgttttcagagcccccaactgcaagactgaagaaactgcaagctgcaacgcggggtcattcattgcagttttgggttgatggttcattttcgtttatggaatatttaccggattcatacaccattttctcgtaatgcccggctttggactttttcaagagcctgctgtgacacaactccctgagatagttcatcaccgtgcgctcgctgatgttctgcagttccttaccgaccgctatggccgttttcgtatcgaaggtatcgggtaacaacgacaacaatactttgggaggctcttcacaggtattgtctgccacgaaggaacggatgcgtatgtatgaatcctcgaaatagtcattcagccggatagcggctttcaccgacaccggatccacaaactgcaggtggctttcatcggaagcataccgcaggacttggataatcagagccagccgtgccacgtgagacggatgtttcatctcccggctatcaacgtcggcatcatcctctatccgattgatacgttccactttttcgttccaccaggagaagaaatactctttggcttcactgttcatggaaagcacatgggcagcgtgttcttccattccgtctccttccgtttctgtatcataatccaaagcaagcaccttgtccagtatcttttcccaacgttttgcagccaaagaggtcttttctccgtcatcatcccggtttgtccattttgatacttccctggatttgggaagcacgaacaggatacggtcaagcagtccgttttcctcgaatccttttttgagaagttcgtgaatacgtttggtctgtgcagttccgatgatgttgatgcacgggcgttctatatgtacaggagtggaattgcttacccttattacatccaaggctccgccactccatgcggtcagcaattgctctatgagctgcccgttcgtgtagcggttggcggaattgaacatgcccatgatctcatccaccaaaatggcaacgcttcgaggattgctgttatgtgtctgtagaagcgattcgggtgtgaagtcggatacgatagtacggtgaagaacaggtttctttccgttttctcctgccgctttccatgcttccacttctgcctcatacgccttgaaaagggcatagtcatgtttacggattggacggtatgcggcttctagcggtggggtcttgcctagtccgggacggcccaccagaatgatgtacagtgcgccgttactctgccagtcgcttttgatgcggatacggtaagtaccgcccaaggctgtcgatgctgccgacagcatggacgtcgcaatgaactcaatcatgtagttctcgtatttggtcatgtcaagtataacggactgtacggcctgagggaatgcgtccaaaggaaaacctgtgtcttcggtatgctccgcctccatgcggattcggttgcacagttcaagccggctgtttttcatgtcagccatttttcctcttgcaataggatgttacactttcggacttgccccctgtctgcacgcggcgtacatcggacttggcatacatgttcttgttgcctaccttgacaggcacgaggtagccgcgcttcgcccacaggttgagcgtgccttcgcatacgtccagcagttcccggacttgcttcgtgttgagatagacttcttccgcttcacgctgcattactgccttctgctcttcctgctgtgccaggatggtacgctgtacgatggattcggcaaacatcttgaggtccgagggagtaatttccagttttacattagctccctgttcgaccagggtttctatggtaatcataaatgtcagttttgaaatttatcacgaccatctgtaaaagttccctgatgcctcactcccgatggcttgtaaaagagaagcaccgccaaccttcggggaaaggattgacggtgcaaaagtatgtatgaattaaaactaattgatatataatactttgtcttaaatcgtcatgacaatttaagactgcatgacaatataaaacagccttattttaccttattctgcaatatctgtttcttcatctgttctgataatgccactgatttcctctgtcaatgtccggaatagttcccggttttcgtcactttctataagtggtgcggactggtctttcccgtccttgattatgtgccttgccgttttcagggacccgacggcctgtcgtatggcactttcgctcttcaaagacggcaaatccggaaattgcagggtcaatccaacgctgtattctttggcggtatgcataccgtccaccagtcgcaattctttcagtacatagtacggcaatgcctgatggacggcactcctgttaatggaaacaaaactgcggagacattgtaggacctccgttttgttcttgcaattaagataatctataagaggtcgttcctgtatctttttctttccggctgtacgctgtatctttgatactgcatcaatgccggaatctgttgattccgcgccaccaacgttcctgtctgtatcggattccatttcggctgttgcggattgcaacgcccattcaccgatgcgattttctttaatggcttcgttcatggcgaagtattcgtcccagtcggcacgggtacggaaaccacttttgatggatacgctaatgatttgtcgggtaacaaaagaacagctttgtctgtccgcttcgtctgcttccggactccctgcctgtttgctgaccatgctgaccatcgcctcgaaactctttccgtagtacagccaactcaacacaagaggtgctgaaaggataatgcgcggttcttcgggcttgctgctgaaaatggattttatcctgtcccataatgtggccggagctgtatcatgcaaaggattactctcctccctctgttcatggtataactccactattcgcttgggtactgcatcctctttgaacatgaggtctatattctcaaaattccccttactgtcatcatcccaacataactcccattcagtcttgattctgggcagttgtctgaatatggccttacagatgtcaaggtactgcctctcgtccccgtttgtcatcagtcgcgcgaaacggttgtattcctctctgtgcgtgttcttccaatgaaggatatccgccttgaactggtcgtatgtcaaatttcgttcatccatattcatagtgtattttcctgttacaatccaaataaaattggatcaaagttttcggttaaatttgtttttatcttatttacagcgtattgcatttcttggtgaacttctcggccaaaggtcaaggcacgagagcctccgccggcctttgatcgagccggtgcggaggcacatcgtgcttaacacctttggctctctcgaaagccgagatttcagaacccgaaaaaatccttcgataaacagattttccttagcggtcagctctctgccgcatatcccttattagtttacaaaggccagaggagcagattattttaagcggacgttaacgccgcaacaactatgtagtattctctctgggaaaatccgtttaccggaagggtttctctatgacacgatactattgacatattcggtctgatgtttcagcacaaagaatagacggtttaccagtttgcgggcgacctttacgatagctttgctcttgggcatccgtttgcattgttccgtatagaacaggttcatcgcagggtcttgacgtaccgccacccatgccgcttctatcaggttacagcgcataacggcgtgttttcgtatggtaatatcccccgtcccatctttctctccgctggagtggcacatcgggatcattccgatataggcagccagttgttcggcattgcggaagcgggttatgtcgcatatctcggagaggaacgccattcccgtagcctgcccgaaccccggaacgctcataatcaaccgcagcggttcgcggaatcgatccgtcttggccaatgtccgtaaagcccgtgtcatctccagtttctgacggcgtaactcttccagatgccggatatgaatgtcgagggcctgacggccgctcggggtgagcgtctctatctccttcaaccaggcgaaaaagcgcttcgaccagttggaaaacggagtgagaaactcctgcggaatctcgatgcctaaataccgaagttgagacttgagccgattcttctgacgggtcgtgtctttggttatcgagttcttcaatcttatcaaggaacgcatctccaacgatacgctgtccggcgtataaatgcctttcagctcgttggctcttaaactccgcgccagcttaccgctgtccacggtgtcggtcttacgcagcttttcgctgctcttggtcggcacgtcggccggattgaccacgatgttgtcgatccctaaggccgtcagacgctcgtgtatccaaaatccgcagaagcccgcttcgtacaccgagtgatactcggcgcccggataactccgagttaaaaatccgtacaacgcttctgggctcggatgctggctaaacttcttcaatacggaggtttcggacaagaccgtaaccgaccaactcttcaaatggacgtcgattcctacataaatcttttgtcctctgaaactaattttgtttctttgctctctcatggctatcgtcgttttagttagtaaaggttttgcagctttaatctaaccaaaatctcgatagctttttcatttatccgctatcatcgcggcttaccctgattgtaaacatagggattatattattggcaagtataaaaggggatattagaaaagagggaaacggtcaatccaataggtttaccagttcttttttcatatcgtcatcaatcttgcggtatcgtacaaaagcccggctgccttccgaatgccccgacatggaggcgatcaggttcgggtctttgacctgcttatataagttgcctataaaagtctttcgtgccgtatgggtggttaccacctcgtatagaggccgtgccacatcctcgcgtgtcttcgggtcgaggactctcaccatacggtctatgcccacatatttgagaatctcctttatcttcttgttgtaaccgaaatgagagaaccggggaagtaatgcgtcttccaagtccttatatctctccagtatgtccaaagccttttggttgagcggaactctgactgtattggcgtgttccattttggtcttctgtggaatatattccacacatccgtccacgacattggctttggtcagtctgttcaggtcgctgacgcggcaaccgatcaggcactggaacatgaatatgtcccgatagaccggatgggtggcccccagaccgctcaggtcggcatagtaaaccctgtccctctcttcgagggtcagataaaacgggtcgccgtacataggttgggttatctggtactggtcaaacggattgtttcttgtcagcccgcgcttgatgcaccacttgacaaccgtccttatccggtaaaaatagcctgtaatgctgttctcggagcggatttgctcgtatttctgcttttccacatccttatagaacaatggatattgtccggcaagattatgttcctcctgtagccagctcttgaactcccgcaaatcatcggcggtaatcgtgtcaatacacaacttaaagcctctacggtgcagtacttcatgctggaaacgctcgtaacggcttatcttgtctatattgccaagatggtgcttgtagctgtcgtccgccaaagtgttttctgcgatataccggctgatctgatagacgagatggtattcttcggctttgttgccgccccttgcgttgatgtcggggtggtggtattcctctatcagtcttttcagccagttcccgtccacaccacggtggtactcctttgtgataaggtgggtgatttgctggatgtccctgtcaaagttcatccgcttctcttccgataccagagccacacgtggcttgtaaccctgtttctccgcgctccagtgattggggctgatggaaagctcgcttgccgcttttatatcgactccgccaatatcccggacacggaaatagacacgtgccagatccgtcacattgttcttggccgatgtctttctgatgaatgccgttactttcatatatatttcctccttagtttatcatttctaccagttttcgcttcatgtcatcgtctatggtgcggtatcgcctgaacgcccggcttccttccacgtgtcccgacagggaagcgatcagattcggatcggggacctgtttgtacaggttgcctacaaaggtcttgcgtgccgtatggctgctggcgatttcatacaatggtttttgtacggtattatagccgtgcgtgtcaaggatggtgaccatacggtcaatgccgcaatacttcaaaagttctcgtatgccaagattataggtatgtatgggcttgaaaggaaacagcctgtccgcgtttacatcatagcgttccagtatcttcaaggccttttcgtgcaaggggactctgactgtctttgcctgacactttttcgttttctgtggcatatattccagaaagccgtccttgatgttttcccttgtcagccggtaaaggtctccgacgcgacagccgatatagcagtggaacacgaatatatcccggatgaccgccagtttaggattgtcactcaaatccgcatcgtacaggacattcctttcctccgaagtaaggtagaacgggttcccgtatgtcggttccttgcagccgtaaagtgcatacacctcgttgtcggaatacttcatcctcttgcaccagtgcaggaatgtacagaagaagttcatgatgttgatgacggtcgtgttggaaagcggcttgggtttgtggttgataagcatacggggaacatagaactcaggatgctcctgacgcagcaggtactcattcgcgacataatcccggaaaccgttcatctgttccagtgtgacagtctccacaaagagcgtgaagtcacgattgcccagtatttcacgttggtagtcgtgatagcgggacatcttacgctcaaaacgtatgatatgctctttggttctatcagccccttcgtacttctccagatattcatgaacacggtagagcaggttcggatggttgcgttcgaaggcacgggcaggatacagcacatcttcgataacctgcttcagccatttgctgtccgccttgtccgaaaaggtcttctccactttctcgataatggcggcaatctgttcgggcaggcgtttttggtcggtggcaggtacggctgtcgtgcgtttataacttagggtatctgcatcccagtacttgtcatgaactgtaagagacgaaaccacctttatatccacattcttctcacggacacggaaacagatgttcgaggtcgtagaggaacactttttcagatagacggaaactttcatcggcaatgcgtttttggttcatatcgcaaaggtatataaattcccatatatgttcccatatatcccgaagaaacttgaaacggattaaaacaaattaagaagtcaatcccgaaactgataccacataaagcactgtaaattagttgttatatttgcttttgttatgcttttcttttcaattcttacttcttttccctattttcaaaacagatattgcagttccacgcttttctttttattaccagtcgtcggggtacggacgatacaatcttaaattttatggataatattacgaagcagaatggaaatgaagtcggcagacatcaggtcgaagggcagacgatcattatcaatcagcaggagcggagaagcacgaacggactgggaaccgccggttttattctggccttgttgggtttgattttcagctgggttccggggctcggctgggtattgtgggccttgggtttgattttttcattcgtgggaattttcagaactccccgcggcttggcgatcgccgggcttgtcatatcgtgtatcgcgttgatcgttttgattatcttggtgagtgcgatcgcttccctggtgtaatcatttcagttggtatgaagaaagagtatcctgtgcagaaggatactctttcttatattgcgatgtttgaaactttaatatctccggtttttcaattccggtacagtttgtcgaacggcgaaagatcgctctaatccggtgcatcgagcattatgttgcagctatcgttgttcttcggagaagccttgaattccgtggaactgtctggctaaaggagctatttgcgcagtttgtcctgccgttcgcgctccttgcggcgcatcgagcgatagctgtttcccatcagcgccagaagcagcagcaccgtgacccaggcgcggactttgtcgcccgtggccgcagtaccgcatgtataaacggtgatgagcattgccaaactgcatgctaaaaggatcatgcagaacctgagcagccgccgaagcgatcttacagaggccatacgagatcttgttttggtttattcttccggttttaccaattgaatgtgtaactcgtcgagctgcgcctggtcgatatagcccggtgcgtcgagcatcatgtcgcggccgttgttgtttttcgggaaggcgatgtagtcgcggatcgactccgaaccgccgaagagcgagcagagccggtcgaaaccgaaggccagaccgccgtgagggggtgcgccgtacttgaaggcgttcatcaggaagccgaaacgctcctgcgcttgttccgccgtgaagcccagcaactcgaacatcttggcctgcagtttcgagtcgtggatacggatcgagccgccgccgatctcggtgccgttgcagacgaagtcgtaggcgttggcccgcacgcgaccggggtcgttgtccaggtattgtacgtcttcgagcttgggcgaggtgaacggatggtgcacggcgtagtaacgctgggtctcgtcgtcccactcgaacagcgggaagtcgatgacccacagcggagcgaccgaagcgtaaaaagcggcaggacatcgtttggggtgttctgccgctttttgcgaaatatgtcgccggacctccgttttatgtgaagggaagaccgatcgggttggaaaaaaacgctattccatcggccggatgcggatttccgttacgtcggtcagttcccgggacagtcggtcgatgtcggttttctcctcgacttcgccgtaatgataggggtagaagatcgcgggacggatcgccttgactgcatccacggcttgatcgaccgtcatcgtgtagggttgattgacgggcagaaaggcgatgtcgatgccatgcagggctttcatttcgggtgtattttccccgtctccggcgatgtagatccgtgtacctccgatagtcaggacgtaaccgcaatcctctctttcgcgggggtggaattgcagacggtcttcggaggtgttgtaggccggaacagcttcgatcgagaggtagtcgcgcggggcgagcgtatcgcccggcttcatcgtcaggcatttgcctcccagcgtttcgctgctggtccggtcgcacacgacggttgtggctgcggtggagagagcggcgacggccgcgctgtccagatggtcgtagtgcgagtgggtaatgaggatcagatcggccttgggcagcgacgcatagtcggcgtattggctgatcggatcgatgtaaatatggcggccttcggtttcgatggccagcgatgcgtgtttgaaaaaggtaatcgtcagctgactcccgttcttcgtggtcagcgtgtccgtgggatacgttgccgcctggtgcttgcatcccgaaactgcaagtgtcgtcataatggcgaaaatgaaaagtttcgaatgtttcataaaaggggtgtgtaacctgctctatttttgggtatagttgcgggccaaccctccttcggaggtttcgcggtagaggctcggaatgtccttgccggtttccttcatcacctctaccacgcggtcgtagctgatcatgtggtggccgtccgagaggttggcatagctgttggcgtcgagcgcacgggctgcggcgacggcgttgcgctcgatgcaggggatctgcaccagtccgcaaaccggatcgcacgtaagtcccaagtggtgttcgaggcccatttccgccgcatactcgatctgcgagggagtaccgccgaaaagctggcaggctgcggcggcagccatggcgcaggcgacgcccacttcgccctggcagccgacttcggcgccggagatcgacgagttggttttggcgacgttgccgaacagtccgcccgtggccagggcacgcaggatgcgcagacgcgaaaagttgcgcgtgttcaccagatgatagagtactgcaggcatgacggcgctcgatccgcaggtcggagccgtgacgacggtgccgcccgaagcgttttcctcggctgtggcgagggcgtaggcatacagcttggcgcgggagcgcaacgagtcggtgtagctctcggccttgaccaggtaggtgctggccttgcgggaaactttgagtccacccggaaggactccttcggcagtcagaccccgcacgatggtttcgcacatggcggtccagatctcatcgagataatcccaaattccggggccttcgcactcttcgacatactcccagaaggtttgcccctcgcggttgcaccactccagaatctcggaaatatgggtcatgggatagatgttggcaggaggattcttggcggtttcctcgttggccagagcgcccccgccgacgctgtaaatcacccattcgtccacgggtttttccgctttgaaggcttcgaaacgcatgccgttggggtggaacggcagggagatgtcgggacgccagacgatttcggtcggagccacgggctccagcacggagaggatcgccacgtcggtcatgtgccctttgccggtagctgccagcgatccgtacagcgttaccttgtaccggtcggcatcggaagcccgtttgacgaatgcttcggctgccttcttgggacccatcgtatgactgctcgagggtccggtaccgattttatagagttccttgagtgattccatagtaattagtcttaatagaacaaatatagtgaaaaccgcgagaaatcgagaacttgcccatagtttttccgaggcgcatcctatcttctacaaagataatgaagggtaagagataagccaaacttgtttaagctcttttgcttctctttgcagataatatgatctgtatcgttcggaggttgatctgctgaaaattgtggtgttatgcttttggcttaaagctatttttaagaaattttgtttatatttgtatatctgaaatttttaatatcatttgcctatgaatagataacgataatagcttttttgatttcccgtaccgttcacgcacgaaaagtgtcggtacatacatataaaagcgttagctttatttcttgcttctgaaacttcgacaatttcaaaagtacgtcaagagtaaagtgtgaacgctcacgcaccagcgtgggctttactcatttatttgacgtacaggtagtcgaagacctcagaagcaaataataagttctgtcccacgcttttttatatttctatttcaacctgtaaataaaccataccgaggggacacggaattatttatgctaaacaatgaaaccgtttattacattgatttgcgtcgggttgttgatgagttcttgtgcctctattttctgtggttcgaaagccaaagttacttttgacggagagatttccgaagaggctactctgacaatcgatgggcttaaacacaccaatgtcacttttccctatacgacaaaaatacgaagaggtttcgacgaaacagtcgtaaagatcgaatcaccgaactatacggcctccccgatcattataaacaaaaactttaacgccgtatcggttataaatctgctcgatgttctcggctggggtatcgacgctgcgacgggcgctatcactaagcccgaattcaaattctatcagatcgattttcaacccaaagaggcgaagacgaaggcatcgtcggtggattagacgtaacttttcgcccatttttccataagtcattttcagaccgcagccaccataggctgcggtctgaaaactttagggcggtcggtgctatctccggctgaaaaaacgtttctgtcggggggctcggtgaagacagttatgtccgggaagcgatttcattggtatttttccggctatcgttatcgtcctgctgcggtcgtccgaattggaaacgaatccggggcaggaaagggggataaagattcaggcgggaacggtctttcgatcgttacccgcctgatttgcggtcggagaagtcccggatcgctccgcggatttcgacaactgcatggccttcgtaacgtcggcatcgatgccgacggacggcgcctgctattttactgcattaactattgcttcgaatgccttcggctcgttcattgccagatcggccagaaccttgcggttgaggacgatgcccttggcgttgagtttgccgataaattgcgaataggtcattccctgcgcgcggacggctgcgttgatacgcatgatccacaggctgcggaatgttctcttcttgagctggcggtgtgcgtaagcatactgcaaacccttctcgaccgtgtttttggctacggtccatacgtttccccttgaaccaaagttacccttggcaagtttcaaaactttttttctccttgcgcgtgacgcaacagcgttgactgaacgtggcatagtaaataagtttttgacggactgtcagcgacgtgattctctcacgttcttcggggctgatttgtcccttgattaataaaattgcgaatccggcccgatgaattatttcaccagcagattcttgatctttgcctcatcggcagcggaaacggtgcccgaatagcacaggttacgcttttgtttagtcgattttttggtcaggatgtgactgtgataagcgtgtttgcgcttgatctttcctgtgccggtgaaagaaaaacgcttctttgcagcggcattggttttcattttaggcatgtcggtaatagttagtttagttatacatagcccacaaagatacgaaaagttttttattctgtcattctgccggggtgaaaaagttatctgtatggcggttatgggtaaaaatcgggactcttgagaagaggcgggcggagccgtacgaatatcccggggatctgcgggggtgccggcgaagggcatcggatatatgccggtccgtatcgtgtgccgcctggaaagtattcgtttccggttttatcggcgggagaacccgttgggtattctggcggatattttcgtaagcctggccggtgacgacgaggattttgccggtcttttttcttggctgcggattcaaatttcgtatatttgcgtggtgaagttacgaaaagagtgtaatttattggaaatgagcgtaggttaattgctcttgatagtaataggttacgatttagttagttatctactgcattatccttctgcgcgttgcgtaaccttcaaagaactcttcgtatgcaaaagtagctatttaattcgagattttgatataaactcccgttttttatcccctcattcataagaattttccgtaaaagcggtattgtccgtcggcacaccattgcccaaaacgagtttggaacaaacgtgtgccgactaccgcatagctggagaaaagggcattgcctcacgcctaaacgatgtttagacagatgaagcaatgcccctttcttttgcgcctatgccaagaggtgcttttacgggttttcaaatgatttttcttttttcgctgtctcttttgccggaagcggaaagtgaatgcagagtgtgtcagcctgccccatgaatgaaacaggcgcccacacacagccggacaaaccgggaagaatgattgttgccacccggctgaacaagttccgtcggatcggaaacaatcatacttcctttgttgtggtttgcccttttcacgcttccggtgatgtctttttccttttggtgattcttttttttacggattttcccctgaagtttttttctacacaatctgcctctgttttcgtttacctccattttgcgcctttcagtaagccgcatcagtcagtcattttcgttctgggcgcaaaggtaattccgggattggacgggaaagcaaggtcaagcctcctgttttcggtaaaaatctccagccctgcgggtagtattttgaccgaaaaaccttgcattccctaatccctaccttttcaagcacccgaaacgaaaacgaccgatgcgacagaaagacgcataaaaaaaatgtcggataaacgagaggcagataagatagtttgaaactcaactccctcagctcttgaatccgcattaaaaacaaaaaaatcaaaaacagcgaagatatgacggcaacggcaaatttcagacaaatggcgcaacacatcgggttggcgatatgcggcttgatgatgcgcaccgccttcggggtgttcggcatcctttggggcatcatcagagagattgtaaacggagtgttccgagtggcgataggtgtaatcgtggctatcctttccaccattgccttctttggcttcatcctttggttattcaccctttaacccttaccgacatggcaaaaagaaacagcaagacggcagcgcagcagtgcagatattacgaggtggacaacatcttcgtgtatatggtggaaacgtacatcaacggcaattttgaaactttccgaagattgtaccacgaactgaacaaggacgcacggagggatttcatggacttccttctcagcgaggtagagccgacctattggagagagatactgaaacagataatctaaaaatgacagcgatatgaaaggaacagaccatttcaagagaacgatatatatgtacttggaacagcgtgcggaggaagatgcgctatttgcaaagaagtaccgcaaccctgccaagaacatggacgagtgcgtgacccacattctgaactatgtgcagaaaagcggttgcaacggtttcacggacggagagatattcgggcaagccatccactactatgaggaaaacgagatagaggtgggcaaaccgatggactgccaagtggttgtgaaccacgttgtgaaactcacggcagaggaaaaggcggaggcacgtcagaacgctgtccgcaaataccaagaggaggaactccgcaagttgcagaaccgccacagaccgtcagcgagaaaagaaaaccaaccccaaccctcattatttgatttaggcttatgaaaccgaagaccaagatacagaaagaggtggcaagactttccgccaaccttcgccccatatcagcgacacaaatagattgggcataccgccactgcgttgagcatatcggctaccgcaccaagaaagggaacatcacctgttccgactgcggtcacgagtggcacagcgacagcggactatgcgacacccttgaaggctgcacctgccccaaatgccatgccgaactcaaagtgcaggacacacgcagacgcatctacaaggaaacgcagaatttcagcgtgataaccacctgcaaagggtatcaggtaatccgcgtggcgcaggtcagatgcgagagcaggaaaggcgaaccgatgcgtttctactgccacgaggtcgtgcagcgttggatttcacccgacggcaaggttacggacatggcgttgctccgtggcttccttttctgctattgcgatgtgtgggcattaggcagcgatatggaggtaagaccgcacaacagcctatacgatgatgtggtggcaagaagctgtgcatatccaaagatgaggatattgccccaactcagacgtaacggcttcaagggcgatttccacggcatctcccccgtgcgtcttttcaaagccttgctttcagacccaagaattgaaacccttatgaaaggcggtgagattgaggtcatgaaacactttcttttcaatacccgtactgccgatgaatgttgggcatcatatctgattgccaagcgtcacaagtatcagatagacaacctctcaatgtggtgcgactatctgcgtatgctcaaaaaactcggtcaagacctccgtaacccgaagaacatctgtcccgaagatttcatggcggcacacgacaacgcaacccgaaaaattgaagccatacacgagaaggaaagagccgcagagcaacgccgttgggagattgaaaggcgtgagcgtgagcaacagcgacaactccaacgaaagaaagatgcggaggatttcatcgccaacaaatccaaattcttcggcttggtaatcacggacgaggaaataatcgtcaaggtgcttgaaagcatagacgagtattacaacgagggcaagacgcagggcatctgcgtgtttggcagtggatactacaagaaagccgacaccctcatactatcggcaaggattggcgatgagattattgaaaccgtagaggtggacttgcgaaccctcgaagtggtgcagtgccacggcaagcacaaccaggacaccgaatatcacgagcgcatcatagaccttgtgaacaagaacgccaaccttatccgtgagcggatgaaagcggcatagcataacccctaaaacaacattgatatggaagtaagaattgaaagtatgatttgtgtgtgggatgatgcaatccccacgatgttccttgaatttgtgaacctcctcactctcacaacgagtgagggggaattgagaaagagcgtaaaggagtttgccgagaagcacgaacttgacaagtttttcctttacggcttcggctcacaccatttctacctgcaccaacgctacacaagcaaccccgaaatggtgatgaagaacagagttctgtcagtacatttttaaccatctaaaaagcaacattatgacaacacgaatgaccatcaacggagtaagcacctgcgcggaagcaggtacggagaaatacgagcgtttccaatcgggtatcggaagacgcaggcggacacttgtgcagtacgactaccgccaccccatagacagagaattgttctcttgtgtcaaacccacgttggacgagtgccgagccgcacgggacaagtggctgaacgcaaagaagggaaaggaggacagactatgaacacgacctatcaaacgctgatagtcaagttcagcgaacctatcacggcattggacggtatctttgacgataccggagcgtggggaacggacaccctcaaggggtggatagatgattacgaaagcacacgtttcaccgccaccgacagccatacggcagtcatcacgagcgagtacaatatggaatgtgtgaaagagtggctacaacggcagacccccatttccgaaatgcgagaattttgaacgggatggcggtgtccgcaccgccaatacttaaaaccctaaaaacaaaagatatgatagccaagacgatattacagcagataggcggaaaacgcttcaccgccatgacaggtagccgtgatttcatagatatgggcaacggcttacggatgagccttgcaaggaacaaaacaagtgccaaccgccttgacatcatctatgacgaaggggcagacctctacaatatgcgcttctaccgcaggacgttcagcaaaaagacctttgagtgcaagacaaaggacattgccgtacacgagggtatctattttgatatgctggaggaaatgttcacgatggtgacgggactttacacacgcttttgagtggcggggcggcgagagccgccctactttctttcagtgagcatgatggcggacaaagaaagtagcaaagaaacctttgtccaatctgcgataactaaaaaatccgcaagtaaaacttgcggaggctatatattgggtcgttattttttggtggaggggaatgataatctcgaaccgttgaactacacatttctgcttcgtctccatttcccccaacgatttgatacgttcaatcatttttgttgttcctttctgaattttcctaaatactttcttcataatttcgctatactttttatggttaataactatgttttgtattgctctcacaacacttacaacttgaagtgttatttggaaaccgataggcaaaaatggctcaacgatgtcaattaacgagaaaatcctacgataatctatcaagtgatagagcaaaagacgtgccaagttaaatatggcacgtcttttgccagttttgtcagtccttttatgggatatacaacagcgcaaactccgcctttctccgtttgagcagcatggcgtggcgttttcctttgtagttgcagaaggctatatactcacggtagatgttcctgtcaccagcttccagcttcttgattaaggtgcttttggggattgttttgctgcctaacagcttcgccggtcccacattgtaagctaacgtgccaagcaaaatcgaatcaaccccgaatttacggaacatggcgacaaatttgcgcaggtctttccgcaaaagttcatccgcatcccgttttgtcatggttcgtgccgaatacttctcgtttggcaaaagtttgtgaccccaaccgacgtatgggtagtgtttttctgagtgccagccttcaaagtagcggcagcataaaaaagcacgttccataagcggcagtcggtagattgccgcctgcccgtccgttccctcttggcggctgatctgcgcggacacagaacagaccgtcagaagtgaacagagcattgtcatgaatacacgcatcatttcaacaaggggctgaagttgccgatgggaacgatggtaagatcgtcgtcctttacattcctgttgttgaagtcaaattccagttcgtaggagttgctaaagttatcctccaccaccacgatgaaattatgcgcctcatcacccgccgccgtgtagtacaggcggaatttttcgttctccagcaggtagcggtcgttaggcaggaaggtgatgccgttatccattttgagcgagccttccccctcgaactggaaatagcggatggtatagagcgtacccgaaaagtcgccctcctttttcagttcacagcggatttccactgtctgcccctttactaccttgttcggcacgggcatgacctccaccgtgaagggataggactgctggatgtccatgtcatcgtcacatgacacgagggtgaatgacatggcggctatcaggcataacgccactgccttgaatattgatgttctcttgtttctgttgttcagtatgttcattgttcttcgatttttagatggttgtttttctgttttttcgttgtcagttgcaggtactcgttcaagtccttgcaaccgtcatagagggaggaacggtcggtgacacgttccccgtatcgcatggtaagtgcggcaagcgtccgccgtccggcttcgtcacggtcgaggaagcagccgatgcgcccgtatccgtccagcaatcccgccgccttctccacgttggcgactgagttcagcacaagacagtcagcgttaccggttacaccaagcgtcacggcagagagaaagtccatgaagccctcgaacacgaggcactcgtcagccgggatgtcattcgcctttaccagtgatacagacttcggaggtatgcaacccttgaaatatcggcttctgacttcatagccacctgccatgttcggaaagccaacggcaaaataccgtttcccacgcacaccgtagttcaagcggcagcagtgacgggatgcgatggcgtaagggatgccccgttcctctaaatactccgtcagcagtgagcggagcagcggagcgacctccacatcctcaaaaacggattcggtcggcttcgagagatagacgggcttttcccatccggcaaccgtcatattggcggcttccgctatgaacttcgcttgcttcatgaagtcatcgctttgcagaaactccccggcaagcgtgaagatgtcgccgcccttgcccaaaccgaagtcgtaccagagctgtttcgccacgttcacacggaaagaggatgtgcgctcgcccctgtacggggcaagataccacagctcgttaccgctccttctgacaggctcatgccccagccgtgcgagaaaatccgcaagcggcatccttctgacagcatctatttccgtcctttccatgcccgtgtcagttgatgatgaacttgataccgaccccgaactgcgtgtggaacttccgtgtgtcgccaccccaaaggcaacgctcccgcaggttggcaagcagggcgatacggtctgccacgtaacactccacatcgagcgtcagcgcaccgccgtagatgaaggcgtcccggtcgtgcagcgtggagccgtcatgcagcaccttcttcccccaatttaccgcctcatatccggcgagagccgaagccccggcatagacgaaaacaatctttcgggcgtccgacagtatcttgaagtaatagccgccctccgccgtgaactgcgccacgggtatcttggtgtccttgtagggattgttcttcaacaggtattcgccaccgaacacccacttgttccccttcttcgtgtaggtggagagagccgccccgaagctgtacccgccgtccttgccgccgagattgaagccgtccgccatgtccgccctcacctcgatgccctgcatcttcggcagacaccgctgggcgtgcgcctgccctgtaaaaagggcaagcgacgcgatgattattgcgatgtactttctcatggtcagcgtacttgaagttcgttgatggtacccgcgcgtaccaaatcctcgttctcaatcacgaaggactggtgacggccgccgttcttctcgttcaattccaccacgaggcacttgtcatcggggatggtgaacttcgccatcgtgaagaccgtgcgctcgctctttttgcccggcacgagggtggcgtagttctgcgcgcggagcggcagaataatctgctcctgcacggcagtacgcttcgcaaccttcttgtccacgattttccaagtgatgtagtccacatcgaaaggcacgttgctctggttctttatctccgtgtggaaataaagcaagccgttgtgcgtgtagatgcctttcaacaggtattggatgccgaaacgcttgcagccgatatgcttcacctcgcgcttgttctgtttgtggatggacttcatgataaggcgcaccagcatcgggctttcgctgcccagctctttcagatagatttcctgcgcgttgttcgggcggttcaccgtgctgccgtcatggatgaagtcgcacatctccacgttgagcaacagcggttcggcggcgtacttcacgttgaaggtgtagaaactgccgtcctccgtgatgacggacatattcgtttcgttgggaaaattccttacggtagccttcacacggatgatgttctccgctccgtcggctttcccggcaatcaggtcgggcgagcctaaatcgacatagcgcacctccgccggaaaaatgacgtggacggtcttgtcgtaggtcacttccagaccgtgcggcggtatcatgcggtcgaaggtcagcttgcgtgacagcccgtgatataggtcgccgtccgcctccttctgcggatagacctccttcgtcaaggtcggttgttcacttccgttggtcgtttcaacggttacattctcctgcgcgttggcagttatgatgcccatagcgagggcaaacatgatgattacttttctcattacttttggattttagtggtaatttttattgttttcaatatttttcttggtaaagcatgaccctgtacccggctttcagatgcaccttgacggttcgcatctttttggcgatgtactggctcgtgccttgtatcagccccttgcccaagtcggaggcgagctgcgccccggcattggtggagatgttgatgctgcttcccagcgagccgcccatgttggcggcgacctcccggacggcgttcatctccatcgagttcgggatgaagatgccgggctgtccgtccgtgtcatagaccgcaagctccacggggataatcgtgccgtcgtattccagcgaggtaatctcgatgtcgagccgctcaccctgtatcttgcccgtgccgaccaccaccgcaccccggggtattgtcctgcctgccaccgccataggctccagcaggcgcagccttaccgtctgcccgtccgtcacgctctgcgccccatgcacgcacgccggtatggtgttcctgtccaatacctccgccgtgccgacagccgtgttgaaaccccggttgcgttcctgcgataaggcggcgacaaactccgcgttactcataggctgtgagagtgaagaaactacttgatgctccacctgtctgataggcattgccttgttcttcttccctttctgcacggtagttggctctgccctctgttccgccgatggctgtcctccgttctgaccgcccatgtactttgccgccagctcgtaggacttctccataagagccacctgctcgtccatagaggaagccttgcccctctcgctttccagttccgactccagcgatgcgatgcgctccaacaattcgtccatctccgcattgtcgtttttcggctggtcgtagaagtttccgagcgtggcgttcaggtcacggtaggcggctgcggaggactggatggtctgcggcgtggctggctttgccctttcttccttgccgcccggattggcgaggtcgaagtccactccgttctccgttcccgctatctcgcggtcgaacatgtcgcccagctgcccgatggcacggttgcggctctcctgacgctcttccatctccccatgctcgtaggctttcagcttgtcgccgataatctgccggttcgccttgtcagcgtcgggcatctcggtgttgtatccgtccgttcccggcggttgctccttgccggaggacggggcgaatatcagccacatcgccccgatgaacaccaacaccatagcgggcagcacgatcatcttctgccgtttcagccgttgcgcctctgtcagcggttcgcgctcctttttcggtttccccgtttcgggagcagctttgttctctttcgtcggttcattctttgtctgttccatataaataaggtgttaagtgattgcctgtttccgccggggtcggcagttccacccgtccggcgtgtcccgtttccatatgtgagccgtcgttcctgccgatgtcatagacggctctgccgaaggtgtaaagggcaagcaccgcgaaggcggcgaacatccccagcacgatgcggcggcgtgtttccggcggcaagccgtccagataccctttgagacttgccgccaagcgtttccgtttgtcgtggagtttccaatacatgccccacattgattttctgatacttttcatgtcctgttaccgtttgatagtctgtaaatccttgttctcaatgatggtgaaaccctcgatggtaaaaccgttcgggttgtcatccgaccgcgatgcgttcagcaggcggcaggtggtcacgaggctgcgctcggtgacgttgctctgccggatgattttctgtgtggcgtaggtcacggcacggtagggataggcgttgaagtcgcacaccacgctgtccaccttcagcacttggttgatgttcccggcgatgatgcggttgtagtaccccttctccgcgaagtccgaataatagtggtacacgctcttgtccgccagcagcaaggcacgtttcacgttgtgttcaatcgcgcttttttcaggtgatagcgtgaagaacatctcgtggaaacggcgcacatgttcccgtgcctccgccgggcggttctgcgacaaatcctgagacaaggcgagcatcaggctcttgccgttgtccagcacatagattttctcccgttgcttctctgcgaaacggtaggagttccacacgctccacaccgtcaccacggcgcacagcgagaggaagacgataccgaacaggcgtatctgcctgaacgacgattcgatgtttctaagtgatttgaattccatttatattttccaatttatgattgcacattgattatttcagcaatttgccgacacgtccgactgcgtttcctgcggctgcacccgccacgctgcccgccatgcttccggctcgtcccgccatctggttcacgttgcgaccgtaaccgcccatgcctccggcttggataatccagcccgcaacggtgggaatggtaaagtagccgatgatgccgatgcagaggaatacgatatacaccccgtcgctcgaatccagcgagaagttcgggtctgcctgcatccgctcgatgtcgttttgcagcatcagaacctgtatcttcgccagtatggtgctgaacatgtccgataccggtagccacagatagacctgtatatagcggcatatccactgcgtgagcgtgttttggaaaccgtcccataccgacagggcgaaggctatcggaccgagaatcgccagcaccacgagaaagaaggtgcggacggtgtctatcacgagggcggcggcttggaacagcagttcgagtatctcgcggaagaagtcgcggatgctcttcttcatgttgtacattccccggtcgatatacattcccgccatcgtcaccatgtcggagggcgaccagccgagttcctccagttgcttgtcaaattcctcgttggacacgaggtaggcggtttcggggttgcgtaccatcgcctcgtattccagtttgtccttctgctcccggtatcggttcatgtccagcgtttccgcctccagcatctttgccgtgccctgtacgacgggtgagaggatgctgtttatcgtgcccagcaccacagtcgggaagaacatgatgcacagaccgatggcaaaaggacggagcatcgggaatacgtctatcggttcagctctcgccagcgactgccatacccggtaggcgacgtagaacagcgcacccagcccggcgatgcctttcgccacaccagccatgtccccacacagcggcatcatctgctcataaagtgaacgtaaaatctgatgaaggttgtcgaacttcataggctaccagtatctttcgttcatgttcccgtacagccccatgatgcggtcgaggtcgttcttctttttcgcacgcaggtaactcacggagatgttcttgttcgtgtagtagctcacgaggttgcggtaacgcttcatcttcgagtggcagcgttccaccacgtccatgcgctccttgtcggtcatggagagcgtggtgatgttcaccacgttcctgagttccgtcaacacttcgttgctttcctccagcagtttcgtgtagccgaaagcgattgcggaaagctcttcgggtctgaaattcccgtcacggagcatccgttggaaactgttcacatagatgtctgtgatgtcgcccaccatcaggatggtctgctgcaccttgcgggcgtccttgaccagattgttcaccgatttgagggcatcgtaatacttcttgccctgctgatagattttcaccgtctcctgaaagttgctcaccatgttcgtggcggtcttggaggtatggatgatgtttttggaggcattgatgatgccctgcgctagattgcccggatcgcttacgacccactgtgcgcttgccctgcccgcgaaaagcaggcacaggcagataatcattgttattcttgttctcatgttactttggattttagtggttgttattcttcggtcggatgtcccggctgcggcttcacccgcacatagtccccgtttggcgagaaagtcagcacatccgtggcctcgttgtaggacacgtcgatgcggaatccggtgttcatgaacaggttgccgttctcctcctgcaagagataggtttccggcttgagcttgcggcgcagaccgctacgacggaacaccgtcactttgtaggcttcgccctccttgtagataagcacgtcaggttttccctccacgctctcccagttcccgcacagcatgtcgcggcggttgtcggccacgtcgcaggattgcagcatcatgaccgccaatccgataaggcacttgctgacttgcagcattttcacttttggtaaattcatacgcgtttttcttttttggttgatacattctgttttttagttattccttgtttctccgcctttcggcaagctgccggatggcggcttcgatgtcgtcgcccagcttctccgccagacggtaaacctccactttttccgtttcctcggtggtgtacgccagatactcttccgcgctgacctccgtggcatagaccgccgactgcgtgccgcccaagcctatccacacctccttgtagagccgtgaagggttgttcgccatgttgatggagagtatctgcgacttctccttttccgtcagtccgagcaacgcctgtatctggtcgaacttgttcatatatttcctttggtcaagcaggattttacaatccgagttgttgataatgctctctttgaccaccggagaactgataatgtcgtccacctcctgcgtcaccacgattgcctcgccgtaatattttctgaccgtcttatacatatagcgcagatattcagccatgttcgccgatgagagggccttccaagcctcttccacgataagctgtttccgcacgcctttcagccgccgcatcttgttgatgaaggcttccatgatgatgatggtcacgacggggaacagttcgcggttttctttaatcgaatctatctcgaagacgatgaaccgcttgccgagcaggtcgatgttctccgtggagttgagcaggaaatcgtaacgcccgccccggtaatactgccgcatggtggtgagcatgttgtcgatgttgaagtcggacttctccaccttgatgtcacgctgtgccagttccttgcggtagtcgtcacgcatatactcgtagaaggtgttgaacgacggcacgatgctacggtcggattggatgcgctcaatataggcactcacggcactgcccagctcgccgctctccgtctttgtcaccttgtcgtcctccgacttccagagcgtcagcaacagggtcttgatgctgtccttcttctccacgtcgaagatgtaatcgtcggtgtagaacgggttgaagctgatgggcttatcttccgtgtaggtgaaatacacaccgtccgctccgcctgtcttgcgtcggatcatgccgcacaagccctgataggagtttcccgtgtccaccaataccacatgtgcgccttgctcataatattggcgcacgaggtggttcatgaagaaagacttgccgctgcccgaaggacccagcacgaacttgttgcggttggtcgtgatacctcgcttcatgggcaggtcggagatgtcaaggtgcagcggttttcccgtgagcctgtccaccatcttgatgccgaagggcgagagcgagctgcggtagttggtttcctctgtgaacaggcacaccgcctgttcgatgaaggtgtggaaactctcttccgccgggaagtccgccgcattgccgggtatcgccgcccagtagagtgtcgggcagtcgatggtgttgtggcgcggcacgcattccatgcttgccaactggctgcccacgtcgttcttgatatgcttcagttcctccgcatcgtcgctccacgccatgacgttgaagtgtgcccgtaccgaggtcagtccgtaggaatgggcttcgttcaggtattggtctatccactcgcggttgatgctgttgctccttgaatagcgagatagcgactgcatgttacgggcggacttctcgaacttctgcaaggtttcctcactgttgtctatcagcacatactggttgtagatatggttgcaggagagcagaagccccaccggggaggcgaatgacagtcggcagtcactccggtcggtggagagcttctcgtaacgggtgtcggtagccaccttgcccggcaggtcttccgcgtcggagagggtgtgcagacacaggcggttgtcgccgatgcgcatctcccttgccgaaagctcgatgtcctgcaaggtggtgtcaccttccggcatgagcgagaagtagcgttcaataagtcccgtctttccctcagtacccacaatctcatcggtggagaggcggcgcagcctgacaagcccgctgtcgttcatgatgcgctcgaactgttcgcaggcttccaagaacttggtcgtggtttccctgtccagctccttcgggatgatatgtccccggcacagcgtgctgaaattgctctgcatccggttacgctcctttgttgtcttggtcaggtagaggtagcaggtgtgtttcaggtacggacgctcgttgaagtgacgctcgaaagagcggcttaaaaagctcatgtcgtccttctgaagctccggtttgtagcgttccttgatgaagtcgggtaggtcagggacattactgcccctttcccccctaagaaccgtacgtgagagtttcccctcatacggctcaagcaactcaatgcttttatttctacataaaagccggctcataatcctctgtttttaactggtaataacttctgcggcaaccgtcatgaagaagaaaactatccattcggttatttgtcagctgttttacgacactccaagagtgttcgttgtctatcggctcaccacagtagggacagcagcgttgttgtctcttccagagatgcagcagtgatttatacccgttgagcgattggagcattttgtaggtttccctgtgttcaaaatattccttccactgcgggtcgtatgggtttgcatcccctttgatttttacaaaccgctttattttggtgtcgtacagtcgtttcagcacgattatactttcgggttttctcttgttgggagtgaccgcgaaagtccatttacggttgttaatcttgtggaaatacttgtcagcaacccaatacttcccctttttcgggtgtcggcgttgtgcccactgccataacttttcgaagatcagtttgtcagctttcctgaaagtcttggatgatacggagtagcgatagtaattcgcccaacccgttatgatcgggttcagtagtcttatcagggattcctgttttgctcccttatgagcttcgatggtttcccggattttgaccataaaccttttcagactctcttttgacggttttatcagaagttttccgttatacttgcgaatgttgtatccgagaaaatcgaatcctttgccgatgtgagttatcttcgttttttcttctgacagggtaagcccccttgcatggagaaactcacgaacaataggcaagatctcgttttgcaacaattccttcgatgctccggtgattacaaaatcatcggcgtaccgtataaggtgtaccttgtagctggtatagacgccctttttacagtgtgtcttaaaccgtcttttcagtaccgcctccaatccgtcaagggtcatattggcaagggtcggcgatatgataccgccttgcggcgtgccttcaaccgtcgggaatagctcggagttgtaaacaaaaccactgttcagccatttgcggagcatcactttatccatcgggatattattcagcagccattcgtggcttatgtggtcgaaacagcctttgatgtccccttcaagtatccattcgggcgatacgtcttttgcgagtacacagaagcattgttcccttgcatcgaacgtgcttcgttccttgcggaacccgtaggagttgttgtcggctgtcgtttcagctaccggctccaatgccatcagatacagcgcctgcatagccctgtctttcatggtaggaatacccaacggccgttgtttgccgttctttttgctgatatagacccgtttcaacggttggggattgtatcccctgcgtttcagttcgctgattgcctgaaacttcgcttttggggttttccataatacacggtcaacccctgctgtctttttacctttgttagaggtcacccgctttacggccaatgctttggcgtaaaacgaatgcgttagcatccactgtaaagctttcactttaccgtatctgccttctttttgagcctttacaatacgtgcttgtagctttttaaccgcaatttcgcaccggagccagtctatgctgtcccaagcgttcgattttcggtcagtcgatgcacacgaaatttctaattcgttcatttgcgtttcaactttaaaaagttctaaaagtttcttgtaaagagtcaccatgcggaagtctgcccgctttcgcgtagggtaacgttgaaacccctatccgccccattacaggacggcattcgctttttccgcattcctgtgcctgcatcccgttcggccttccttacggtcggcttacctgttttcgtaggagagatacaggttttccatgttccgtgtaagtgacaaagagaatgggttagaatctgtcattccgccggcagcagtgtggttcgtgtaaccccagactggagagggttatcctcgctgcacccgtttccgggcttgagcctgtcagtatcgtttggctcattcaaactaacgacgtttagcgacagttcacatgtgttattcataccattcaagccaagctcccgcgccgtctgatactgacgacgattgttttcccctcacggttcaaactgcccctttcgggcgggctaccttgtctgggcagcttaatacaattaaggtgcatctgcccataggctactgctgacgaaacagcaggtttaatctttgttttatgtcatactcgatgacttaaattatttgttaaacaatcacttacacgacatcatgtcgcacccagtcctgtttgtggacgacggagtagtccggcagcaccttgatagccttgcaccagcaactgtgtatcgcctcgtactccgcacccgtcacggtgtaaagttccggtagttccacctcgaaagccaccgtgatgtcggcgtcctttgagatgatgcagccatgctccaccgctaaaagtgggaacctgttttccagtgttgtcattttcgatgtattcctcattgtctttcttcctttcgttgtcgtttgaacagacgggttatccgccgccggttgataaggtatcggggatggctccgtgccgctcctaatttcatcagcccgtgttcaccgtaccgggcgttcagcgcgaaggtctgccatacaaggagggaggacgatgccgcgccgaagccgatacatatccactggtcgataccgaccatgtagaggatgacgaacaggacgaagagagccagcagacctccgcagaagatgaagaggtactgtgccttcaagcccttgaactctaccggacggccgatacccttgttgattgggtattcagccatacattatttattaaaggaagaatgagcgcaggatggtggcggcaacaatcaggaagatgcacgcgccgaaccacgaggcggctgtcttgctggtgtcggggtcgcccgatgaaaacttgccgtacacttttacgcccccgataagcccgacgactgcaccgatggcgtatatcagtttagttccggggtcgaaataagaactcaccatagaggtggcttcgttgatgcccgcgatgccgtttccctgcgcgaaagcggaggcggttgcggcgatgacaagtgccgcggagaggattgcttttctgtttttcaagatgttcttgttcataaactgttcttgttttttgccgtcaaaagggtggatggtcctttgtcgggcggttgatactttgtttctttactttggttttagtggatgcccgtttgtttccacggacgtgggcgtgtccgttgcggatggggatgcgccttgcgtttcctcgccgcgtgggttgatgtcattctttcatgttcatttcttttattgttgtcatacatagttgcgaatgtcgaactcctcgatgttgtccggcacgacgaactccttttcagatttcttcagccgaatctcgataagccccttgatgcggatgcctatctccgaagagccttccatcattttctcgtacaactccgtgccctccatgtcggtgaacaccttagccgccttttcacgttccgcctgtgtcgcgtccgggtttttggcggtcttgcaggcgtcgtcaatctcgtcaaagctgctgcccgaagcccgtggcgtgtccgaggcgtcctcttccggttcgtcgtccccgtatcccagttcctccggcggtatgctcgtgaaggtctcatcgagtttttcctccgggacttgtgccgggcgggatgcgtttcccgtttttccgtcgtcaaaagtagcctcttcctccgacagctcaatgcctttttcaatagtggcggcttcttgcgtcggtatggcagcggttgtccgggtggatgccatcctgaaacggctcttgccgatgatgtccgccttttccgcagggacttcctcgtgtgccgctatgcgtttagcctcattcccgtccagtgaccgccataatccgacaatgcccttgaagaagcggacaatccgcgtgtccatgatgcgctcgtaaaggagcaggaacaggaaccagaggttgcagccgaccgataccgccagcagaatgtctgtcatgctgattgtgtaattcatatccttccgtttttggttagaatactgaattgtaatttcgggcataaaggctctttatcgcatcttcgcactggttgaagtggtgcgtcagcacatggtcgatgtaagcggacagcgtaagccggtcatgcccgattacacgggtgatacgcatgatacgctcgtggtactccgggcgcacatacgccatcttcccctcacgtgcctttacttccgggtcgcggatgaacaggcgttcatagtccttctcactgcatttgccgcttaccgggacaggcgacagtatttccacactcgcctgcacttgggtaaacatacctccgcagtcttgctgtggtcttttttcattcggtgtcatttctttttccattttcaaatcagatcttcacgttgtttcttgtacagttcgttgattctctccttgtgctgttccagatgctggcgcagcacggtatccacatatccgcctactgagatttcccctccggcgatgtcgttcacgattctgaggatcttgccgtggacgtcacggctgatatagacacattggcgggtctttatctcgttgcggcgcaggaatagctcgttgtagtcctcgtcctgccttttccggcgtccactttccctctgcgctttttcccgtgttacgggttgcacaggagatggttccggtgcggcggtgtcctcttcggtcggtgcagctgcgggtacttcctgtgcggggcgcagtgtcccgtcctgtgtgcgccgcccgatggaggctaacagcagttcctcgtcgatgccttccgtgttcactttcctgctgcccatgctcactgcggtctgatgatgtcgcttatctcttcggaaaactcccggatgccactccctttcagcagtgccgtgtccatcgggaagatggtggagcggaaaacgctcttgcgctcttccgaaaggtcacggcggaacttcttgctgtcgggcaagcgggtggaaagtaccggaaagcccatttcggctatcacttcctcgtagatgccgtacaagtcgttcctctccctgccgtccaccatcgtccagaacagatgcagcccctttgttttcgcctgtccggtagtcatcagcctgtcgcggaacatcgtgacgaatttcagggtactctccacgacaaagcggtcggcactcagcggagtgaaaatgtagtccatctgcgagagcgtctttatcacgccgttgcttcggagtgtgccgggcatgtcgaagaacaccacgtcgggtttcacgtcctcagtggcaatcatcctctcggcatcgtcgagggcgttcaccgcattgcttttgacgatggtgtaggcgttctttttgatccggcggaaatggtcgcaagcgagagccttgaagtaggtgctgctgtcgataagccccatttcgtgttcgcgcagcccgtggatgctgtgctgcgggtcgtcgcagtccacgacggcgacattgtagcctttcacgttgtgcaggtagctggcggcaagtgccgtgacagtggatttgccgatgccacctttctgtgttgcgaatgcaacgaagatttccttactcatagttccatttattttaattgttgatgatttgtttttctgtttccatacggatttggctgtcgcaccatccgcttccgtgactacacacgcaggcgggtcgtcgcgtatccggttctgtggtgaagcggtgcgtcggacaaatggtgattgacgacattgcgtcatgaagtcattgaatccatacgtcaccgaattgtcggagaaccgggtttccgacggttcgggtatccgtttcggcaagtatccgaagaagcggatttccgggtatttgaatgttccgtttatcatatcttcaaatcgttcgtttcttgaatcatgctgcaaataaacaagtatattttggaacctgtatcacttctccggcaagtggcggcacgttgcgccggttggcagtcattgaccgggtcaagcatctgtccgataccgctttaagggcgtaactttgcacccggacagcagggttcgccgatgacgcgcggcccggagtcctgaaaggtattttcccaatccgtcccctgacggatttttatgttcacctgaacatagcaagatgtcttttcagccgctcaaaatattttgagcagccacgaaaagcacttgcccttgcagggggcgggctttccctccgaagtcgggaagcctttcagaactgcggtgctgtaatccgaagcggcggcttatgccgtcaatccgctaaatccaaagtaatatgaaagagaaaaggaaaagcaaatcagggagaaatcccaaacttgatccggcggtgtaccggtacaccgtccgtttcaacgaggaggaacacaaccgtttcctcgccatgttcggaaaatcgggtgtctatgcacggtctgttttcctcaaagcgcacttcttcgggcaaccgttcaaggtgctgaaggtggacaagacgttggtggactattacaccaaactgtcggattttcatgcacaattccgtgccgtgggtacgaattacaaccaagtcgtgaaggaactgaggctgcatttttcagagaaaaaggcgatggcgttgctctacaaattagagcaacacaccgtcgaactcgtgaaactgagccgccggattgtggaactttcaagggaaatggaggcaaaatggtcgcaaaaatcagtgtaggaagttcgttgtacggcgcgattgcctacaacggggagaagattaacgaggcgcaggggcggcttctcaccaccaaccgcatctacaatgacggttcgggaacggtggacataggcaaggcgatggagggttttctcaccttcctgccaccgcagatgaagatcgagaagccggtggtgcatatctctctcaacccgcacccggaggatgtgctgaccgatattgagttgcagaatatcgcccgcgagtatctggaaaaactcggtttcggaaaccagccttatcttgtattcaagcacgaggacatcgaccgccaccacctgcacatcgtgacggtcaacgtggacgagaacgggaaaaggctcaaccgggattttctctaccgccgcagcgaccgtatccgcagggaactggaacagaagtacggattgcatccggcagaacgtaaaaatcagagattggataatccgttgcgcaaggtggccgcatcggcaggtgatgtgaagaagcaggtaggcaacaccgtgaaggctctgaatgggcagtaccgtttccagacgatgggcgaataccgtgcgctcctttccttatataatatgacggtggaggaagcgaggggcaacgtgcgcggacgggagtatcacgggctggtctattccgtcacggacgacaagggtaacaaggtgggcaacccgttcaaatcctcgcttttcgggaagtccgcaggctatgaagccgtacagaagaagtttgtccgttccaaatcggaaatcaaggataggaaactggcagacatgacgaaacgcaccgtcctttccgtgctgcaaggcacttatgacaaggacaaatttgtatcccaactcaaagagaagggcatcgacaccgtactgcgctacacagaggaagggcgcatctatggggctaccttcatcgaccaccgcacgggatgcgtgctgaacggttcgcgcatgggtaaggagctttcggcgaatgccttgcaggaacacttcaccctgccatacgccggacaaccgccgataccgctatccatccctgtggatgctgcggacaaggcacacgggcagaccgcctacgacagtgaagatatatcgggcggtatgggcttgctcactcccgaaggtccggcggtagatgccgaggaagaggctttcatccgggcgatgaagcgcaaaaagaagaaaaaacgcaagggcttgggtatgtaatcagagtatcaacaattaaaaaatcaatgtatgtcacaacaagaagacgatttgagggcattggcgaaaatcatggattttctgcgtgccgtgagtatcattttagtggtcatgaacgtgtactggttctgctacgaagccatccggctgtggggcgtgaacatcggcgtggtggacaaaatccttctgaacttcgaccgcacggcggggctgttccattccattctctacacgaagctgttttccgtccttttgcttgccttgtcctgtctgggtacgaagggtgtcaagggtgagaaaatcacttgggggagaatctggacagcatttgccgtcgggttcgtgctgtttttcctgaactggtggttgctgcccctgccgctgccgcttgaagcggtgacgggactgtatgtccttaccattggaacgggctatgtctgcctgttgatgggtggtctgtggatgagccgcctgttgaaacacaatttgatggaggatgttttcaacaacgagaacgagagtttcatgcaggaaacgaggcttatcgaaagcgagtattcggtcaatctgccgacacgtttctattacaggaaacgctggaacaacggttggatcaatgtagttaatcccttccgtgcgtccatcgtgttgggtacgccgggcagcggcaagtcctatgccgtggtaaacaattttatcaagcaacagattgaaaagggctttagtcaatacatctacgatttcaagtatcccgacctatctactattgcctacaaccatttgctgaaccacccggacggctacaaggtaaagccgaagttctatgtgatcaacttcgacgacccgcgacgctctcatcggtgcaatcccattcacccggattttatggaagatattacggatgcctatgagagtgcctacacaataatgctcaacctcaataaaacgtgggtgcaaaagcagggcgacttcttcgtggagtcacctatcattctgtttgccagtattatctggtatctcaaaatctatcagaacgggaagttttgcacgtttccccatgctatcgagtttctgaaccgccgttacgaggatatatttccgatactgacctcttatccggagctggagaactacctttcgccgttcatggatgcgtggcttggaggggctgcggagcagctcatgggtcagatagcgtcggcaaaaatcccgctttcgaggatgatttcaccgcagctctactgggtgatgtcagacagcgagtttacgctggacatcaacaatcccgaagagccgaaaatcctctgcgtgggtaacaatcccgaccgtcagaatatctacggtgcggcactcggtctgtataattcccgtatcgtgaagctcatcaacaagaaggggatgctgaagtcatcggtcatcatcgacgagttgcccacaatatacttcaaagggttggacaatcttatagctaccgcccgaagcaacaaggttgccgtgtgtctgggctttcaggatttcagccagttagtgcgtgactacggggacaaagaggcgaaagtggtgatgaacactgtcggcaatattttctccggtcaggtggtgggggaaacagccaagacgctctccgagcggttcggtaaggtgttgcagaaacggcagtccatctccatcaaccggcaggatgtttccacctccatcaacacgcagatggacgcgctcattccaccgagtaagatttccgggcttacgcagggaatgtttgtcggttctgtatccgacaacttcaacgagcgtatcgagcagaagatttttcattgcgagattgtggtggatgccgaaaaggtgaaacgggaagaaagtgcctacaagaaaattcccgtcattacaaacttcacggacggggacggcaacgaccgcatgaaggaaacggtgcaggcgaactaccggcgcatcaaggaagaggtgaagcagattgtgcaggaggaactggagcgtatcaaaaacgatccggtgctgtgtaaactgctaccagataatgagactgtctaacaagtccccaaaattgaaaattatccctatcgaagtttgaagtgacccccaaaagttggatacaatttttttggggggcacttcagttctgacgggtaaaatcgtaaaattcggacttgttagacaaatacttacgcggtttcaacctcaggtactgaatctatcgaattgacaaatttaaccaattgcggatctgaatctttttgtatgaggtttcggagactctttttcaattcataagcatcatcccctgctgtatttattaaatccatataaaaatctttgttttgcagaatcaatgaacggcatgccccatcggaaattacaggtttcactattttatcaataacgtctccagcttgacttttcaaattaccatgcgatctaagccatgtttcgaaaaattgaaactttattgcattgatagtctttttaccgatgcagaaatcatttcttatatcggtaactgtcgatttaatttttcgtttatccaatctttcaactatattcttgaaacaattagggaaaggattcaaactttgagttccagaagcaatatccatcagaatctttttgccaaattcagtcaagttatctggcaaggatttgattttagccagtaaatgttttattgcgacaaaccaataatatgatgtatgtgctgttctttgggcgtataatgtatcaacacttatttcagacaacgcttcgaacgctattttattgatatgatcggtcaggacattgcttattttagtggtcaaatcgtaaaaagatgcgtcaggaattacatctttaatattgttcttagtgatatacttatccaaatcggtattccactctgctaaatgctcgataaatacctcatccgttacacctattctgttcttaatatcttcaaattggggcaatatgtctgagagcaataatttatagccaagtttatgatttaccatgtattgtagtgtttcatttaatagcggtatattccatcccacactatttactaataagtctccatgatccacataatagtccatgagttctgcaacatattttatatctccaccctctattaaggaaacggaatgaccatgtgccaattgcatggcgactaaatcgtaatatccagactctttaatgtttcggccatcagtttctaattcagaatgcaactgatttatgtaggttgaatctaacgttacaggtaaaggtctttcttcgtcagatgccaataaacgataggttgtaaatatagcccctatattatctttatttacattctgttcatcaatgcaattcgtgatcgcttgcaaaagcgttggaaacgtataggtagaattatcttttaacgtttttacaatatctgcatggtcgaaattatcgggtagtaagtttgccaaataattatcgagcgcctccgaatttgttgctacttgataatatttatatgctttagttgtcgcgttatcccgataggcagcatctgttgcatttgcagcttgaatataatcgataaatgtatttggcttgactgtttttgcttcaatcaatgacgtaaaatcgcacgccaacttattttgcgcaataaacctgtctattgcatctaacgttttgaaatagtcgccgccattgaagtcattgaaccgaactatcttcttatataattgagcaatcacatggttttggctttccgtgtctaaatgcaacagcagttcttggtattcgacagggaacacctgcttctctatggattcttttaatttcaattgtgctattctttgccatacacgcagaataacatcgctctttcgagttaatttatgcaaacaatgtataatcttatcgataagcgcattgtccatacattgtataacttcttctaatacagtgtcaaattgtttattagtctctgcatattgatttatgtcgtggtcttcttctccgttgatgcagccttcaatatattttttcaatggaatttgtcgagcatcttcaacatcgacaccatataccaaagctgcaatttcgcgttgtgtttgcagatcattgttaattattgtttgaatgccattcagatagtcgccggacaatatttgttctactggatttgccagaatatccgtcttcttcaaacagaacaatgctatgtttatcatcaaaatttcgttacaccactcttgtttaagagcgaccatctcattgatatatgatataatttccctaacattggcattaggatttaccaatctgaatatccgatttatagtttctttcgcttcattttctgtttctccaaatgcttcaacaaacagtttgttgaatatacttcgatagtcggtaataacaggaggagcaacacgataaacaatagggaaagttttattgataaaatacttggtcagttgtttcgtttgttcgtcggtctcatctccgaatgcacaagctaaatgtgtttcatcgaaaggaataacagcccaaacattttcaaaaccgctatcggcgaagaacgtatggatagaagaccataattcttttactttttcagcggggagacgatccatgttgtcaaaaacaaggactaatttacgttgtcctttttccttgataaaatcagaaatgtcttgcatccatgttttgaactcgtaaaccgttggttcgtcttcgctcaaagtctcatagcaaacgtccttttcgactttatcttgataaatagctaacatataactccatccatatttatgatctttgctatatgcccatttccaaacgcacaatgcaataagaactggcagtgcagctatgataatagacaataaagaaaaccaccatgttgtgggtgtaggttttactgcatacgcaataaatgtaaatatcggagttaaaactgcaaccaaaaatgccgcaaccataccattactgataaggggatatttttcggttacggtctccgttttacgggctaataaatatttcagcttttcagaccatgatacggttttcgtacctccacctttgacttttattgttgcatttccagataggataccatcatcaataagtttgcttgtaagcaattccaatatagagcggcgttgcaagtcctcttgatgtccccatgcgtcatactcaaaaaagtaatagtcgtctgataattcacgttccaacattttaaccacgttggattttccagatccccaaataccttcgatgccgataattcgaggtaaagtacattcctcatccaatgaatcattctgacaaaaatggcgagcaatagtttttgccaacctttcttgcgaacctccatcgaatttgtcaataccacacggtttattttggataaaccgcggatattgctgtttggattgtagttttgtttccatatacgtaatttattgattatacgaactccaaataattctcccgatttaccacatgaaactcggcatagggataggcttcttggaaggctttcggtgcggccggcattttatttccccacttgaactccaaggcggtaagactgtcggcactctcctcaatcaggtcgatttcctgtttgtcgtaggtgcgccagaaatagaactccctgtgcagtccctcattgaagttcgctttgcgccgctctccgatgatgtagttctcccacagcgcaccgacatcctgccgaatggccagcggtgagaaagccccgataatggcattgcgaatgccgttgtcgtagaagtaccacttgccagcttttgtaacctccttgcgtaggttacgcgaataagcccccagacgatagataacgaagaccttttccaataggtcgaggtatttttcaacggtcgtcttgctcatgccgagttgtttacctaactcttcgtaagaaacttcgctgcccaactgaaaagctatcaatcgcagtagatcgcgcatcttgctcgaattttttaagccgtcaattgctaagatatctttaagcaggtatgcaccgacaatatcacgtaggtagtctgttttacgttcatagttctccatcattactacttcgggataggaaccgtaaatcaagcgcgcttcgaggttctggcgggtttcaagtgccgtttccgtctgtgcgatttcccgttgcgagaatggtgtaaggagaaattgcgtactgcggccgaccaacggttcaccagtcttattcagcaaatcgaatgacgaagaaccacttgccaagacacttattcccggtatttcatcaactatcaacttcagaatactaccgatttgtggtatgttctgtgcctcatcaatagccagcaaatcaataccatccaataaatgccgataattggctattgagcgattctccaatagtgctaatgtgtcgtagtcttcgccgttgagcatcatcgtcctacctgaatagttgtccacaattttacgcatcattaccgttttaccaacacggcgagcaccaaaaatcagtactgctttattgggcgcgattcgtgctgtaatcttctcttgaagtattctatttactgtttccataccttataaaatataatgcaaagataatcatatttttttaattggcgaattttacaaaaaaaacgggctattaaatggcgatttttacaaccacaatcttatggaagttgtttcattgtttttagtaatgatatatgttcatactatgatgactcaataatttaccagacatacgtttctgaaatttgtccttataggaatgaaaaactcacatatattgtgctaattaatatataattaaatgaaaataaaaagacaggatacgagtattcctgtcttctcatatgtaatggatatttttttattttctcatccgctccaactcctcatcacgcaacattctctcgttcagtttttcctgcatcctgtcaatgaaataggtgcggctttcgttcttccggcgtttgatatcagtgtagaagcggtagcagtctttagaatcaaccccgaatatcttatagagaagtggggcgagctgtttgagcggcatattgccgttgttgatgcagcccatcacgtctatgccgtagataagttccacgaggtcgatggcattgcccgtccattgaagaaggctggcggtggtttctgttgcgttgttggcggatattagtggtggcacttggggcgtggcaaggaatttctgcatctttcttacgaaagacagagccttgctgacgtaggcggcaatctctcttttttcttctgacagattacgtacgggatggtgctgcaactcgatttcgatgtaggcaagcgcgatgacggtaaggttcatgtccatgccgccgttgcacagttcgatcacttgggtggcgaaagccgtgtatgccgtttccatattgcagtcgccggcttcgtttatcaggcggaaaaagtcggtttccgccagcaagaaataattcatggttctgtcaattttgaaaattacactttgttttctgcgtgcgcacatgaatataattggcaaaaaacgcggcagaaaataaaaaatccaacactcaattttacaaagtgctggatttcagaggtataaaattcagtattttttcacaaggacaaattatctccgacttaaattgtttgtaatcggaacatttattctattcctgaaaatagaaatgtatgcttgccgcacattttggctatcttgcttttttatcaaggatatagataatgcgacatacaccgttgggatagcttttcaaagaggaaagcgtccagtgttgctctggcagagccgacttaaaaaaatgtcgtccgcttccggatatgaaaggaacggtgtatagtatgatttcatccacagcgtgcatccgcagcagtccgtttatatagtctgccgtgtccggtgtggcttccgcgaggtaacggatgtttgtgcagtcttttctccattcgtgcagcattgaaatggaatagtccggtgtcacacggtaaaaggctttcttcctgatttcatcaagaccgcaacggtcaaggcacaaatcctgatgtgctttatcatataactctgaagaaagacatccgtccatcgtcagtacggcgagaatctgaactttacccataatcgtttcctttcgttaggcaagggtaaaaaagtagcgtgcaattcacactaccttcaagcgatggctctggtaaagcctttacggagagtacgtgaatgcacgctatgcgtaagcatagcataagcatcacgcaatcgtctccgtagttccaatttaccagattttcgcttgaaacgccttgcggtcttatcctatatgttggcggcgaaaagctcctgccaatcgccgtttttctcaaatgttatgcaaagatagccaaattcagtgaattacgggctatgattgcttgaatttatatttaagtccatactcttcaagtttgctgtatagtgttgtcctgcctatgccgagcagttctgcggcgacactccggttgccgtttgcctgtttcaacgcacgcaatatccgctccttatcctccgcgtcattgcgcaaggcgaagctgacagtagaggtcggtttcgtcacggcaagttccagatgctctttcatgacaacaccttcctgcgcctgcaatacagcacccataactttctgccgaagttcccgcacgttgcccggccatgcgtgtgtcagcaacgctttacgtgcttcggaactgaacccgctcacgctacactccagctctctgtttgccatatcacggaagaactctgccagcggcataatgtcttcttgacagtcacgcaacggaggaacggttatcccgaagtcgtgcaggcggtacagaagatcctgccgaaaacgcttttcattcaccgatacctccaaatcttcattggtagcagcgatgatgcggacattgaaattccggtctgccttgtctccgaccgggcgataccgcctctcctgtatggcacggagcaacatctgttgggtttccaacgcgaggtttcctacctcgtccagaaacaacgtgccgccttccgcctcatggaaatatcctttcttggcattgtccgcacctgtaaatgcacctttgacgtgtccgaagaaagccgacggtgcaagctctttggagagtgaaccgcagtccaccgccacaaatggcttgcctgcacgtttgctcttgtcatgcaacaggtgggcaatatgctccttgcccgtgccgttctcaccaaatatcatcacgctcatatcggtggcggctaccagccttatgcggtgcatgattttctgaaaggcggaaccttcacgggcgaatataggcatacggcgttgtcctgcctgacgttctttcagtatggaacggatcagggggacaagtttatcctccacaagctgtttgggaatatagtctatcgagccgagtttcatgcttcccacggcggtattaacttcggcgtagtcggtcataatgatgaagggctgcatctttccctcctttcgcatccagcacaaaaggtctatgccactgccgtcaggcagacgcaggtcggcaaccacgatatcattatctgttgcctgttgcagatgtttcttcgcggttgagaggtggtaagccttcatattgcggtagccctcccgtgacagcatattgcagacatattcgcaatacacgatgttgtcttccaccacaattatttttgtcttattcatcttcgtattttctcctttcctcttctgccaaccgtattatttccactcccttatccagcacggcagtcacggcatggcttaacgcttcaccatccgggagagcatcgccacgaagcaatccgtaaagtacattcagcggttggtcggcacggagcacctcccacgaactgcgcaggtggtggatcagggaatccagcttttgcaggtctttttcttttgctgcatcccgtaccgcctgcatttccttttctgtttcagttatcaacttttccagcatgacggcttcattgccataggacaataaggcggaaaagtccggtttcccgtccggtgtcgcttttatggcacacctgtcggaaacctccatcagttccgatatggagaacggtttgaacaggcatccggcaaagccttttgccaatagttcccctttgttacaactgcccgaagcggttgccacaaccaccgggattgttggtgaattgcccacgttggacgaacgcaacagttccagcaattcgaaaccgtttatatcgggcatattcaagtctgtcagcaacaggctgtattctttctggcgtatcatttccatcagtgccgcagcatcggtgcaagtgtcgcagtgtattccttcttgggaatacatctctttcagcatcagaagtaatacctcatcattgtcaatggcgacaacatcatggaatttattgttatgataaacaggtgtattgcttgtatatccaagctgttcttcagcttcctgcatagaaatttcaactgtgaaacgactgcctttccctttcttgctgtctaaacggattgttccgccaagcatcgacacaatattacgcattatggcaagcccaagcccgaaaccctcctttgcggcggcatttgatagacgttcaaacgcaccgaacgcttgtttctgttcctcttctgtcatgcctgtacctgtatcttcaacgaccagtgtcagaactccattatcatattcagtaatcaaagaaacaccgccttcttctgtgaacttgacagcgtttgacagcaggttattcccgatttgtattattcgctctttgtcggtcaatacaatggcatcgtgtccagtcttcacggacaaggacagccctttgttcacggcaacaggcatgaactccgtttcaagtgtgtgcgtgattgctgaaatccggcagggtgacagacggggctgttccttgccgttgtccaggcggaagaagtcaagcaaagtgttaagcatatcccgcatacggtcggaggattgcagtatgttttggatatactgcccggacttatcctcacactgttctttccgtatcagtccggcatagcctgttattgctgtcagcggtgtgcgcagttcatgggtgatagtatgtaccgccttcttccttgacgttatcagtgcctcgttccgttgtacggattgttccagttgccttatcaaatcagttgtcttgtgcttgtattgtttaatgctttttgcatcacgatgtatgatgatgtaggaaattaacaacaatagaagaacgaatcccattaaaccgcctacttgcataaatgacttttcacgcatggcaactatttcgttttcccggctttgcagttcggtttgtaccttttcttctatttggcaaatcaattcttgcagttgtctgttaagttctgcattacgagctgcaaggctgtcggcttgttccgacaattggcgatcctgcactttctgttcgctgattacgtttctattgaccgaatgaaggatagtggttgatactgctggagttacttccttttttttgccgaatatgcctaagaaaccttttcgttttggctttttggactgttcctgcacacttttctgtacaataaccggaatttgattggctatcttcttgttaatagattgttgttcatccattaaccggactatctggaacatctgtcgttccttatcctctaaaagactgcgcacactatcgatgcgctctgctggataggtggccttgaaacggcagagcatactgtccattgccatacgccgtgcatggtaatgctcgatatctttatcgttccattccagtattgtttcacccaatagagaaaattttatcatttgaatattgatattgtttatttcttttcggagctcgtctatttttttattgccaagttctaatgcttctatctcctgccattcatagaggctattatatgccatacatccgataagaatggagataagtatatatcccaaccgtattgccttatagaaatttcctgaccgctccattattttaatgacattgatttttggaacatgaataaaagtttatctttttcgttcatgcggatattatcagaataaccgtcttttgttatttgatacccacatggcttaaccataaaaatgcctaagcccttagtgtacgaacttacttctgaggcatagtctttacttgtatttaatggaactttccctttaatatgacaccactcattattacaactgatgtcttcaatctcagacatcagtttttgcaaatctgtaatagctttggaactcgctacttggggtatctgcaactcaaaacagagcatcggttcgagaatgtccacacctgactgttgcaaagccagcctgaagacataaggggtcagctgtctgaaatcagcaggtgtacttaccgggctataatactcggcttgagtaaaagttactttcagatctgtcacttcccatccatgtaaaccagattggcaagacatacgaatcccttcaaaaacggcattttgaaaagaatggttcagataaccataggagatgtcactttcgatttgcaaccctgcccctaacggtaagggttcaagagtcagccctattgtggcccagtaagggttgggtggtacttcgatctgaataatcttattgaccttttttataggtcgttctttgtagatagtcttgatctcatcaaaatggacctttacggaaaatcgttcttccagcaatgtctgtatgatttccttttgggtcaaaccatataacgagatttccaattcatcactatatgagtttatggaaaaggacaaagacgggtcttcaatccacaatgtattcagagcggatatcaccttgcttctctcttcgggcttatttggccggacggaggatttgagagcgggatgctgatgagataatccttgaatcaaacaaggtttagcacctaaataatctccgattcgaaaatcttctatatcttctacaatcgcgatatcattggcacccacttcatcaacatttatctctctgccctgataaatagtctttagatttttaatcttgatgaatttttccgaatcgttgattcttacaacgtctcgaagtctcagacttccgtcaattattttaagaaaacttcttttatgccctttggggtcatgctctatcttatagagataagctgaaagtctgtttgagactgatgccggaggaagtataaaagaagaaatggcgtccaacaactcattgataccgatattgaacattgctgatccatgtagcaccggatagactttggcttttgccacaagagcgattatcgtattccaataatcagccggtgaaatttcgctatccgccaaatatcgttctaatatatcgtcgtcatggttgcatacaaattctttgtattcttcctttatatatgtttgggagcaaaccggataaaccgatccatcgacaacagtttgcataaacaggacatcttgcgacagatttgtttttatatccatatacaaacgctccaaattcacaccggcacggtcaatcttattgataaatataattgtcgggatttgcagcttttgtaaagtactgaacagcaactttgtctgcgcttgtatgccttcctttgcggataagatgaggactgctccatcaagcattttgaatgtccgctccacttccgcaataaaatccatgtgtcccggagtgtcaatgatattgcatttcactccattccagataatagatgtcgtagaagcccggacagtaattcctctacgtttctctatatccatagagtccgttatggtgtcaccattatccacacggccgcacttttccgttgctccactggcaaacagcagattctcggttacggaagtttttcctgcatcaatgtgagcaagaattcctaaatttataatattcatttggattaagcaataatatactacagtagatgcattgtcgaaacgcaccttttaatacctcctcgtagcatatgagaactacaggattactaactcgtattaatatgtatattattactgccgcataacgattacaaaattacacaaaaaaatatatctaacaaaagtgggaggattttttaactttttaccatagacattttattagggaagcgtaggttcaactggcaagtacaaataagtagaaatgtttgaacaacaccgttttaggaagttgaaaaatcaagtttctctctcggtatagcgtttattttggccaatatcttctttagtttagcatttgtgtatttcccattcgtgttctatttagctccttattatgagtatgtagcaagttacttatcaaattcagcctctttgagggtcaaatatggttttgcaaatggtgactgacaagacataaacaaggtcagcaggaattttttacataaatggacatgaatgtatataacctaaaataagaataaattttaataagggctgcccaaaaagaaaaaaatgcagttgccatcctatagatacttgcagaaaggataaaatttacttttagaccttttgggatagcccttattaatacttcagataaaattccttaggttatattttcaatcctttggaccgggtttcctccttggcatacagtcccggacgcccgattatgacatggttggcaacgatactatccgccggactgcgtatctgcggcggtgcattttcgggatattgcgcctgcctgttcctcacatcttccgcttccggcttgagctgttgcccttcattctccttttctgcgacttcgggcgtgggtggcgcaagctccagctgaatttttcggtcaagggcggcaagttcggacttcaactgcttcagctcgtcctccttcttccacaccttacccgctatctcctgtaactgcggtatctccatctccagcacctcgttcttcgccttgtactggtcgatgatggagggtatcctctccatcgcgttgaggaagttgcgggcggcggccaacgggtcagccatcgccagatgcccgttgttgtaggtgtacttgtagttcccctcgaccacgaagcggttgtcggtgaactccaatccctctttgagtatcctttcgctcaccacctttatcggaaaaccgtaaagttcaccgacctgcgtgtacaaccctccggtcgtggcattcttggctatctcctgcaaacgctttccgatgaccttctcatcggcggaatccactccgtccacctttattatattaaggcggttgccctccttgtcggtctgcaccaccgacaggaagcggttccagtcctccgtcatggcatctatgaaagccgtgttgttgcgcaactcgccggtctttgactccagcttgaactccgaatcacgcttgcccttgttgaacgacttgcgttccccttcgagcgatgcgatccgcttttccagtttcgccttgtccaacaggtcggtattgccggagagcaacgccatatactccgagaagttcatacccgatttttcgtccattgctccctcgtcgatggtacgtgcgcccatcgctccacttttgagctgcgatatgaacgtctgcttgcagtgcagcagattgaacttgtagctgtccagcgacttttccaccgcgtagatgatgacatccacgttattctcggcaaaatgcttggcaatctcgttcccggctctaacaccccgtccgtcacgctgttgcaggtcggacggtcgccacggtgtatcaaggtgatggatggcgacacatcttttctgcgcattcacgcccgttccgagcatacttgtggagccgaacagcacgcgcaccgtcccggcgttcatggcatctatcaccgccttacgagccttatccgtcttacactcctgaatgaagcgcacctcacttgccggtatgccgtaatcctccaccaacttgcgttttatctcgctgtacacgttccatccttcccccggctgatatgtccccaagtcggagaacacgaactgcgtacccttgtgcgcctcgtacttgtggtaatactctgcaatcatcttggcacaatggcttgccttgttgtcgggatggtcctcgtagttcgggtctatcatgcgcatatcaagagccatctttctcgcatagtcggtggcgatgagcatcttcgccttttcctccgtttccgacaggggtaacctgccaagcagagtggcatcgccggttttggcaaactgcatcagcttctgtatgaagtcctcctgctccggtgtgggcggtatgtggtgcagtctctcattcttgtttggtctgtccacacctacatcctccgccgtgcggtagtcggtaatctcgttgtagaaggcggcaagctccggcaccttgatgaaatagcgaaaacgctccttctgaacgatattgttcgttacgttgaactcaaaatcggtcgtctttttggcgaagatggcagcccaagcatcgaaacagcggatgtcctgccgttccagttcgttggggcgcaggtatttgaagagcaggtacagttccgtcagactgttggaaatggtcgtgcccgaaaggaacgtagcccccaagtccttgcccgtgcgttcctgtatggtacggatggcaaagagcatattcagggccttctggcttccttccgagtttcccaatcccgccacacggtcatgacgggtgttgaaagtcaagttcttgaactggtgactctcgtcaatgaagatgtggtcgatgcccatctgcttgaagtccaccacatcatccgtgcgggacttgatagcgtgttccaccttctccagcttcgccacaaggttatgcttgcgcttctccagccctttcagcatcgcccgcgacacgttcttgccctgctgccgcaagacttcgaggttttcctccaccgtgtcaagctccgcctgcaggatgcgctgctgcaactccggtgactgcggtatcttgccgaactggtcgtgcgacatgatgacgcaatcgtaatcgttatttttgatgttgttgaaaaaacgcacgcggttggcggtcgagaaatccttttcagaagcgtagagaatcctcgcattgggatatgccgcctgataggtggcggcaatctccgccacattcgctttcagcccgataatcatcggcttgtgcgccaagttcagacgcttcatctcatgtgccgctatgcacattatcagcgtcttgccggttcccacctcgtggtcgcagatcccgccgccgttctgtttcagcatccagacgcaatccttctgcgacgggtaaacgctcttgattccccggcttgccagccctttcaggttgaggtcgggaaaagtctggtgcgagccgtcatacttcgggcgcacgaaacagttgaacttgcggttatacatcgtcgtgagccgttccttgaactgcggcgactgttcttccagccattcggagaacccgttacggatttcgtctatcttcgcgttggcgagctgtatgccctcgctgtcgcgtaccttgatgtcgttgccgttctcgtccttgccgatacttttcatcatgtcggggcaggtgttgtgcagggcgtgcttcaacaggtgcataccgtcatagttccggtaatagccctttactaaaaactcgtccgtgatcttcatggtgcggtagccgcacgccacggaaaactcgtccatgcttgcggagtaggctattttcacgtccgtgtcgaaaaggtggctcatgtaggcggcatacacgcccgtgggaatccagcgttccccgaaattgaagtcgaggtcttcaaaggagatgcgctgcggttcggcctccttcaatgcctcccacgcctgtttcacctccggcatccgctcactttcgggattgtcctccatccagccctctatgcgttccgccttctctatcacgttccccgcgatgaaacggtctttgatttcgtaaccggtcacgagcggattgtagtagatgcgcccttgcagggcagtgagcaaatcctccgccgtgctgtcggttatctcccgcatatagtcgagattgaccgtaccatatttgttgagcgacgcagacagggcttcttcgggagagcctacgttggcatggctctccaccgcgaaggaaacaggatgctcgaagatgtccgccttgacgaactttccgttttccatccgttccagcgaaaggatgtcgcgcccgcccgcatccatcatcactaacttcacgttctgcttggcgttgaggttgccgtagcgcatgacaaactcatcgtaacaggtattcagatgctctcgccacggaacatttgcctcgcgccggagcgattcataacggtacagacgctcgtaggcgtcacgcagcgacacatacaacaacgccttttccttctggtatcctttcaggtcgagcggctggaatgtcgccccgtatggcgtgatgtctttcaggtagccgatgttatgacgcccccggtcagccaccagcgacccttcgcgcaggtgcatctccggcgtgcggtggtaggcacgcggagaaaggtccacgacttcctccttcggcttttccgcttcgatgtcggggaaaaggaaagtccccaccgcttccgatggggtatctgtaacggcaggtgcggcgactgcctccggctgtgtttcctcctgtcgtggctgctcacgggaagtttccggcacggctttcacttccgtcttttccgccacttgtttctcgttatgctgccttgccagttcccgaagttctttcctacgctccggcgtcaaacccatcatcatttcatagaaaccgttgatgggaggattggtatcccagtccagtgtggcatagatgtcgtccgggtcggcaggcttggcggtgttctccgctttcacctccttattctccattgcgggttttgcagttggagctgtcggtgtaaccgtgactttcggtttgggcggagtggactttgccgtaactgcctttttcaccgtctttttctttttggaggttttcggttggctgacctcttccgtcatcccccagaggtcaagcagggtgagctgcacgcctgcggaatattgcgggcgcggttctatctccggcttttcatctgcgggttgcggcttttctgtcggagtttccaccgtctgcgccgaggatactgtttccaattttatggcaggacgctctactttattttgaacggcaactttttcttccgttcctgcctgccggattgaacccgaatacaagcgcatggcaagcctgtaatggaaatcctcgtcgagcatacggcgcaaatccccggcgatgcctgctgccttgccctcgtgcagataaaccatagcgggcttcccgtaggggtctgtgtcaagtttcgccatcgtatgcacgatgcgttccgggtggtggatgaaataggcgttgtcggtcagggcggttttcgtgtccgtctgtatcacggtcatcagccgctcgtcctgcgacatttccttcttgctgaggttcttttgcaggacaatcaggtcactgcccacctccgtgcccgcgttgtccgtgaacaggttgttgggcaggcgtatcgcggataccagattggcctgactgaacagctcgttacgcacggaggtcttggtgctattcaataccccttgcgaggtgatgaacgccacgataccgccgtcacgcacggcatccagtcctttgagaaagaaatagttgtggatggttttctgggcggagcgtctgccgaaagagtcgctccgctgaaactccgcgtcgaacacggcaatgtcaccgaacggaatgttggacaccgccaagtcgaaataattgttgaacggtctttcgattttctcaaaaccgcaggtgcgcattttctggtcgggatagagatgcctcaagattgtacccgtgagcagatccttctcgaaagccatcacatccgcattggggctgtgccgcagcatggaatccacgaacacgccgacacctgccgacggttcgagcatacgggcggggcggacgctgtaatctgccagcacgtccgcgatggtgtcggttatctctttgggggtgtagaaagcggtcagcacggacgctttcagcgaatccacaaaccgcttgtactctgtttcgtccttgctgttctcacggataagcctgtgcagctccaccgtcggggcgaacagttcgaggtcggatttcgcccaccggacggcatccgtcagttcctttgcagggttgaggatacatttcagaccgccgaaaccgcagtacctttgaagtatggcacgctcttcggttgtcgctgtcctattttccctgtcaaggatgaatgccgtccgtatcgcctcgatgttgtcccgcagtttctgtttgcggttaaacgccatattcgtctaagtaaaggacggttgctcccgtcagctccgtgtagagcaggtcgtaatcggaagacagggcgaaattgtcatccgagaggtcatagacggagaacacgttgccgacaagcggcagcagtttcaggacaaaggcttcacgcttctcttccggcacttcatcggcaaactcgttttccacgacttcgcggaggatggcgtaacgggaataatgcagcccgcgcagcagcgtgtccatcgccagttcctgcgcaccatcggcgggatagccttcaagccgtgccctctcatacgtttcggcggcacggtcggcccgttcccgtatgaaagcggtgtcgtcagcctgttcaaacttgttcgtgcggagatagtccagcaggtacagaccgtaataggaaaagtcggtctgaccctcgtttttcttcttgttgttcattactttggatttagcggattgataattaacgggataatcggttggaaaaaggaagaaaaaggcactcggtatccctccgagtgccaccactaaatccaaagtatgagtgtaatccggtatcgaagaacaattcattactctgaacaagtggcaaagttaatactatttcttccgtcctgaaaatttcttgtcctttttagcctccgggaacacaaaagtcgtgttatattccccgtcaaaggcgacaacagcatcgaaactcttgccctgtttgctcttgaaccctttgagcagcttggtatgcccttcggtgagcaggtctttgatttcatcgtcggacagggtgcgtcccgctttcagccggaacacgggcagtccgcactccgtgttgtcgcagcgtaccaccttgccgtagaaccgcatcctgcccgtgccacacttgggacacgcgcagccggagtcacggctgccgaagagcttgtcgcacgagatcagttcggaggttatctcacgtgtgtacgcctctatctccttgcggaaggtgtcgtcggacagttccccgcgctcgatacgcgccagctccttttcccattcgcccgtcatggcaacatcggcgatgcgcatcgtcttgacgacggaattgagggcaagtcctttttcggtgggaacaagcgacttcttgcagcgttccatgtaaccgcgcttgaaaagcgtttcgatgatggaggcgcgtgtggcgggagtaccgatgccacagtccttcatcgcctgccgcagtgcgtcgtcctcaatttccttgcccgccgtttccattgccgagagcagggtggcttcggtatgcagcggcttgggtttggtctttccttcggtaatggacgagcctttcggtgtcagcgtgtcgccttcctgccagccggggatggtaatttcctctttttcctcgccatagacggcacgccatccggtttgcttcacgacgctgccttttacggtaaactccactccggcacattccgccgtgacagtggtcacatccttgacgcatttctcagagaatgcctcgaccatgcgcccggcaatcatctgatagatggtattgtcctctttggagaggaagagcggtttctcacccgtgacgagcagggcatggtggtctgtcaccttgccgtcgtccacgctgcggcgtgtcggggcggcttttgcccgcaccttgtctttccattcgggctgtgtgccgatgaaagcgagcagtttgggaatttcggcaaacacgtcttcggggatgtagcggcttcccgttctcggataggttatcaacttcttttcgtagagtttctgcgcgatttcaagcgtctgttccgccgtgaagccgtgcttggcgttggcttctttctggagcgtggtcaggtcgtagagcaagggagtttcctccgtcttctccttgcgctcggctttcgtgacagtggcgcaacctgccgcctttaccttattatatagttccatcgccggttctttctctttccatttctcggaggatgagaatttcacgacttcgccgtcgcaaccgtccgttgcgatatggagctgccagaatgcttcggacgtaaagcggcggttctcccagtagcgttcacataccatagccaacgttggtgtctgcacccgccccacggaatacgtgccgtgtccggcggcgatggataacgcctgtgtgccgttgatgcccacgagccagtcggattcgctccgcgctttggcggcgaggtagaggttgtcgtatttgctgccgtcttcgagtttccgcagtccctcgcggatagctttgtcggtgagagagctgatccacaggcgcacgaaaggagtggtgcaacccgtatagtggtagaggtagcggaagataagctctccctcgcgtccggcatcggtcgccacgatgatatgttcgcttgtgtcgaacagtcttttgatgacttttatctgcgacaccacgccgctgtcgggcttgtaacctttctccgtcctgacctgacgggggacgagcgtgaatgtgtcgggaataatcgggaggttgtcacggacaaatccgcgcacgccgtagccgtcgggcatggcaagctgaacgaggtgtccgaatgcccatgtcacggcataaccgcctccctcgaaatatccttcctctctctttgtcgcgcccacgatgcgggcgatttcacgtgccacggagggcttttctgcaatgattgtcttcatgtcttcttcttttttgttgatactttggattttattttggattcagtggcggacacgggattacattttcatgcccttgcccgttttcttctgcggcttctcctgctgctgttgctggcgggcgtccttcgggttggtctgacctttctgcaacggctctctcagattctttgtagcctcgttggtcttgccatcgttgttcaccgccacctgcgtgcggctctcgttggacggagcaacctgctgtgcattgtcagggttcgtgtcgtagcggtacgggcgtcccttctccgggttgaacttgatatacatcgtggcatggaagccctgcttgtcggtcacgttctccagcttcacggctttacccgccacatagtcggctttctgctggtcggtgaagctcacgccgctccatttgctgatggggcggatgctgccgtcctcgttcgtccacgtgttgcggcgttgctccttcttggtctgtgcggcattttccccgccctgcgcctgacttttcgatgtgtcgcctttggtttcctgtgtctgtgcggtacggggcgacttgccggttcccggcacgaactccacgccgcgctgctccacgttcacttgcagggtggtgacgaactttctgccgtcgttgcgctcgatgagcttgtcgcgtacgggcagtccggcgcggagcatgtcccgctcctgcgtggtgatttccgtcttgccgatgcgctccgggatgcgcaccctgcttgccggaatgtccgtgatttcattcgtcttgcggtcgatgctgatgtaggaggggatgatctcgcccgtttccctgtccacaatgtccacgaccctaccgagattgcccgtttcgcggaggttcttccggtcattgtcggagaatttgtgttccttgtactcatccagcttctgctccttgcggatgaagtgcggcacgaggctgatgtttccctcaccgtccttcttgaaggagaggcgggcgtccagctcgaatgattcgccgccgaaggtcggtttgacctttaccaagtcggacttgccatagttgagcatcttcgtaaggtcgccggacttttcaaggttgtcccgctttacgccccatctgtcctccagctcctgccagttgattttactctcgtcgatgggctggtagccacgtttgccctgcatctgttcggatttgtcctgttgctgttctttccgttgttccatgttctcctgtttttgaggttcttgtttctctgtctgttgtgctgccatctcttcctgcaccttcttctcatagtcggaggtgtccaccttgtgaggggcgagcagctccttgttcgcttcggggtctttcagcagttgcttcatcacctctaagagattttcagcttggtctgccgcaatgcggtagaaaccgaagcggctgggttccttgcactgccggaagaagttcttgaagaagttgtccagcacgtcgccatgtcggtcgaattgcaggaaactctgcgcgttctccgcttttgcgggggtgcgcttgggtgtgccgtccgcgttcagcccggctaccacgctgatctcgcctgtcttctcgtcacggactaccagcacgtccttttcgtcttttttctttgccatctgaaaaatgttttaatgggttatttatgaaagaaattatggatacgagccttgtagaaggctatatcttcctttttgaagtccttgatatggttggaaaggaatgtcagcacgtcctcctcgctgtaataggtcttcttgcccagcgtcttgtagggcaatgcgcctacgctgcggtagcgttggagggtgcgtttgcttatctggagcaacatgcacaaatcctgattgtcgaaaaggcggatgctttccgtgatagtgggctgtttcccctcagccttcatcgccagcagcagttcgtcctgacggtcgagccgttccatcagcttctgcatccagccctcgaagttgtttcgtgtgagcagttccatgacctatgtcctccttccttttggtttgccgcccgtgcgcagcgtgtggttgtggaacagggtgtctattgtcccttcctcgttccttactgtgttgtcctccaatagccgcagtatctcggaaaggcggtagcggcagcttccgcgtaccaccacatactcgatacggtggtcggtgcgcatacgctgcatggtgcgcttgctcacgttgagcatcttcgccgcctgtgccgtgtcaagcagcttgtcttcggtttcccgcttccgtttcttctcgtcccttgcctcgcggatgtaccctgcgatgttcgcaatctgcgccatcatctccttgtaggcggaactttccattgttatcactttcatgttcagtcctttctttttgtttctgcgacaaaattcggcaataaacaaaaggggctttaacaactcactacgtgactcacgtaagatttttgcggaagatggctccgtaacccggtcaaacggcgcaacaggcagcctttcagcggaaaacgatacgtcttgtatgccgtttcgttacctttgcggcaaactctaaatgacatgaatatggaaatagtatctatcgagaaaaagactttcgagatgatggtggcggcattcggcgcactctcggagaaggtcgccgccctgaggcgcaaaagcgacacggggcgcatggaaagatggctcacgggcgaggaggtctgcgggcagttgagaataagcccgcgcacgttgcagacgctgcgtgacaggcggcttatcggctactcgcagataaaccgcaggttctattacaagccagaggaggtgaagcggctgataccgcttgtcggcacgctctatccgcacggcagatgatttgatttattcacccactgaatccgaagttatgatgaacgagaacaacgatgtttttacgatggaagacgagccgatagcctctgtggtgcaggatatgcgcaaaggctcgaaatggctgtccgcatttctggaaagctaccgtcctccgctggacggggaacgttacctgacggacggcgaggtgtcggaactgctccgtgtgagccggcgcaccttgcaggaataccgcaacaaccgcgtgttgcccttcatacttttgggagggaaggtgctttacccggaaacggggctgcgcggggtactggaagcgaactaccgcaagccgctggagtgaggcggtttcatgaaaaagtaaacgggtgacaccttttgtggtgctacccgtttacttgtcttatggggtatgtgcaatcagcaatacccggcttttccgttctgtatgaacatcacgtatgtctgccgtttctcttgtgagagtgcctttcccaccagccatgtgcggaacaggtgggtgttgtaggtattcaccctgaaagcgaccgggatgatgatttcaagggcgtacacgtccgcgtgcagcccgttttcaagctgcatgtagcggcacacctcgtagtcgttcagcacgtccgacttgcggacggctctgatggcggcgttcactgccgggacggtcgtatggaacaatccggctatttcggtggcggtcatccacacgtcgttaccggttacgctgactgccttgtcctcgatgatgattgtgtcacgtttcatggcttttctttttagatggtgcaacctgcaaattcctcgacgccgttcaatcttgcggcaaggttctccatgtcctgattgagcttctctttggttatctttgcgtaaatctgcgtcgtctttatgctcttgtgtccgagcatggagctgaccgtttcgatgggaacaccgttggagaggaatatcgtcgtggctgccgtgtggcggctctgatgccacgtgatatgcttggtgatgccgcaacgcttggcgacggcacggatcccggcgaggcacgtgttgtagtggggaacagggaaaatcctgccgttttcgcacagcccgcggtatttgtcgatgatttgtttcgcaatgtcaagcaggcggatgttagacaccacgcccgtcttctggcggttgatgtttatccactcgtgttcatcgaagtaggtgcggatgttctcttccgtcaaattgcgcatatcggcgaatgacaagcccgtgaaggcgcagaacaggtagaggtcgcggtatagttcctgtttggcgttcttcagtttaccttccatcagcaggcggatttcgtctttggtcaggaaactgcgtgtcgtttcctccttcttgatttcatactccctgaacgggtcgcgtgtgagccattcgttgttgatggcgatgaacaccatcgtccgaagtgggcatacatacagccacacggtattggtgcagcagtgtttgtccgtgcgcagaaacatctcgaagtcggaaatgaaagcgggggtaagctctttcaacgcgatgtccttcacgtggtaacggatgttgagaaactcttgcaggtgcttgtaaacggtcttgtacttcaagagtgtgcctttggctttcatgcctgcttccacctgcttggcatagtcctcgttgtgttgctggaacacctgcatcagcgtgtgatagcggtgttccagtccgagaaaggcgttcttcaccttctctgccgtgacgaagttgtcacgctccatgatttcctgatagtgcttgttgatgcgcacccgcatcttgtcaagcatgcggttcgtttcgagtgccgccgtgcttctgcccgtgacacgtccccctttggtgtcccacaacttgggatcgatggtcagtttgcaactgaattgcgtctggctgccgtccaccgtgatgcgtcccatgacgggaaccgtcccgtcttttttcactacctgacgtttgaggtagtaaataactgaaaatgtactcttcatcgtccttaattttttttgttcaaaattagttggtgaagagccctcctctgatacgcaaattgcggaagaacggcgcaatcttttttcgttaccggattttttgcgtgagttgtcagtaactcactaatccttaaagccttgtttcgttattcgtgtccatttcgtcacctattgggcgtggttacgaacaagtaacgtagctccgtcttgatttggcttcggcagggattgtaatggcttcacggattatcgccacttcaaccaaaacccttgtaactcaattctatcactatatctttccgcatttcacttttttgtagtaactttgcattttaataatatattttgatgtaccgattggcacgggttcgaaacctaccgatatttcgacttttcttcgaactcccttgcgaggtgttgtgggggtaggccgcattgaaaaagggccgcggagttgtgaccgatcgccgaaatcggcaggaaagcggtcgtggtacagggatgaatagttgcctatcgaaattgaacgatgacgggtatggaaaatacgatgatatgggattttgtctggcgtctggtgctggctgcgatattcggaacgataatcggtctggaccgggagtaccgggagaaagaggcgggtttcagaacccattttctcgtttcgctggggagtgcgctcatgatgatcgtttcgcagtacggcttttcggagattttgacgcatgacggtgtgtcgctcgatccgagccgtatcgcggcgcaggtggtgagcggtatcggtttcatcggggccggtacgatcatcttcaaccaccagatcgtgcggggactgacgacggctgcgagtctgtgggctacggccggtatcggtttgaccgcaggcgccggaatgtcgtggctggctcttgccgcaacgatcctgacgctcgtcgcgctggaggggttgagtctggttttccgttcgctcggatcgcgccggatggtggtcgtattttcggcatcggaccggaccggtgtagcggacacgctggaccggatacggacggacggttatatggtcgtgtcgtacgaagtcgtgccgcaggtcgtgggcggcgatggaataacctaccgggttacgatggtggtcaaggccaaacccggcagtgacaacaatcaattgttggctctgttgcgggaaaacacggacataatagtagaaagaatcgcgtaataattttgtatatatatgggacgaaactctcgggggtttttaacgggtataacaacctggtggcgtaaaaagataatcgcggtgaggcattcgttttaccgcaaacggctggtgcggcgattgaccaatctcgccccgtcgatcctttcgctggattgtgtgggcggtgttatggcgcacgacctgcggctgcgtttcaattccccgacggtcaatctgttcttcgaatcctgcggggattttatcgactatgtggcggatttgcgctattattcgcaggcggaactgtgcgaatgtccctatgcgtacgagggggcgcgtcgctatcccgtcggtatgctgaaaggaaacggcacgctgcccgatataaagatccattttctgcattaccgctctttcgaagaggcccgggaaaaatggctcgagcgcagcggtcgtcttgatttcgacaacctgtgcgtagtcatgcaggcggcgaagctcgatgagggccttttggagcgtttcgaacggctgccgataccgcgcaaagtgatcctggcctacgaaacattgccgttgcaaagcccgtcgattttcaagatgcgttcgttggattctttcgtgccgggccggatcttggattataacggtctgtcgggacggcgttatctcgacgatttcgattacgtcgcgtttctcaacgacggaacgattcgggcgcaaaattgccccccccgcagaaattccgcgcctgattccgaggtatggttttgcaggtaattccttcggtaaggaggctgtcgtaatgagtttttgtttgttctgaaacagcgcgaaaattcatggtttttcaggagagcagggcgaggaaatgtaattttccccatctgttctttttcagttgtttacttgctgcgcccgcttcatacgatgattcgatcgtctataatgaatgattcaaaatggggattggagtgaagaaccagtaccgattggttgctgaaatataacgacaaagaatctcttgcactggaaatgttcgcatctgttatttgttgctgcaacagacataataatcccggatcttcggtgacgggataaatctcttcgtacacatgggttctcccgttgcgggagaatgaaaacgatcccataatctgaatatttccattttcctagaacaatccgatttgattgatcgaataacagacctgttcgatggtttttcccttcagccgttccggactgaaatcatcaggaataagatacataacgattggtttaaggagaggtagggtcggcatttcagtccattttgcagggctgtttgtcgtggtagcggtcggtcgttataagacggacgttttctgcttcagctattttacctatattgggccggaacctcataattcttattctgtaatttttgggatgctggcttttgggtgcgatgacggtccggagaattcggttgtggagatcgacgtgtcggagatctcagtttttatcgggttttcgggttattgccaatatcgatatacgatcttcagaaatttttcccgggacatgtcttggggattcgtgcccgggaccccttccggtatcggttcgtccattgctgcgaaatggtcgatccagaattgcggcaaccgaccgtcggccgtgcggaaattcatcggccgggctgtgaaaagatgttcgcttttggggccggtcaaataacattcccaaaccagttcgctgcaatacattttgccgttatggggtagaaaggagtcgtcgtagggttggcccagatactttttggcttcgccgatcgcccgggtcgccagctccctgcgttcgggaagagttatgcgggctatcgctgcagccggacggccttcgattgtagcggacgaatcgaggaatttttgcagcggagtcatcgtcaccccaggctcggactttgcttccagcacataaataccgtccggttcgaccgtgatgattcctacatgggtgaacgaaagatcggactccccgcctgtcgcatcggcgatggcttccgtcattccgccggcgatcccgacctggaagatcaaatctcccgattccgggtgaaattcctgctgatagcaggaggtcagcaggaaaaatatacctataatatatataagcgttttcatcggaacattataagttaagggtgatcgcgcagtcaaaggcagtaaaaagagagggtgcagtcgtgcgggcatgcacgcaaagattgccgagtcacatcctatcttctgcaaagatagtgaaaagcgggggcgagccaaatttatttgagcatacaaccgtagcttgttcttccgaagatagcgaaagatggagtagagtgaggcaacttgccaacttgcatgtaaggattgtcgaatctccttctattgcctttcgagataagagtaattttcagagtatttatcgttggacagttatatatttttagctgtcacgactgttttgtcgctgattttggcggcaacttatagtttgggcaagctaaatctctttcggaagggaggatgtcgggcagcttcagggtgaaggaagggcggtatgtcgagatataaatcaggtattgctgtggaggtatttggttaattttcgtttgcgtagtgagtttttgtggttgttgtccatatttttttgctgaatttggtggaataaccggtgtgcctgcgtacaaacgggaagaatgaatcgaaaattattgggagaaaccaccgaattttgtagctgccgtttgtgatgatatttatattgaacggcaggaacaacagcattgggggtgagaaaagctggaaaaactttgtcggaaatatttctgaaggagtggtaaagccagaatttttgtgtttatttattccttgaggagtgaaatggcggggattgttgtcggggatttcgagcggatttgtctttcccgaccttgtgttcttattttgctcgaacgtgtgttttccatctattttcgggctggatggagtggaggcaggttttgcacctgaaaaagttttcgatgtaatatgttgatgtttagtcaagtgtgacgattcggcgaaaatagtgtgaaaaaagagtgaaaaatatttggataattagagcaaatgcccttatctttgcaaccgctttgagagagaaacacaactcacagcgacaagttctgaaaaagtttttttttgaaattttcttctcgaaaaatttggaagtttgaaaaaagtgctttacctttgcactcactttccgactgaaaaatgagaggagagaaggagagctcgaaagaggcgatccgatgaaaaacagaatcgttctaaatagaaatatatagaacaacgttctttgaagatattgagcagcaagtttttatccactctcatacgagagtgatttcaaacaatacctttgagattggagctaagatttaacaaaaacattttatacaatggagagtttgatcctggctcaggatgaacgctagcggcaggcttaacacatgcaagtcgaggggcagcataatggatagcaatatctatggtggcgaccggcgcacgggtgcgtaacgcgtatgcaacctacctttaacagggggataacactgagaaattggtactaataccccataatatcatagaaggcatcttttatggttgaaaattccgatggttagagatgggcatgcgttgtattagctagttggtggggtaacggctcaccaaggcgacgatacatagggggactgagaggttaaccccccacactggtactgagacacggaccagactcctacgggaggcagcagtgaggaatattggtcaatggacgcaagtctgaaccagccatgccgcgtgcaggatgacggctctatgagttgtaaactgcttttgtacgagggtaaacgcagatacgtgtatctgtctgaaagtatcgtacgaataaggatcggctaactccgtgccagcagccgcggtaatacggaggattcaagcgttatccggatttattgggtttaaagggtgcgtaggcggtttgataagttagaggtgaaatttcggggctcaaccctgaacgtgcctctaatactgttgagctagagagtagttgcggtaggcggaatgtatggtgtagcggtgaaatgcttagagatcatacagaacaccgattgcgaaggcagcttaccaaactatatctgacgttgaggcacgaaagcgtggggagcaaacaggattagataccctggtagtccacgcagtaaacgatgataactcgttgtcggcgatacacagtcggtgactaagcgaaagcgataagttatccacctggggagtacgttcgcaagaatgaaactcaaaggaattgacgggggcccgcacaagcggaggaacatgtggtttaattcgatgatacgcgaggaaccttacccgggcttgaaagttagcgacgattcttgaaagaggatttcccttcggggcgcgaaactaggtgctgcatggttgtcgtcagctcgtgccgtgaggtgtcgggttaagtcccataacgagcgcaacccctaccgttagttgccatcaggtcaagctgggcactctggcgggactgccggtgtaagccgagaggaaggtggggatgacgtcaaatcagcacggcccttacgtccggggctacacacgtgttacaatggtaggtacagagggcagctacccagcgatgggatgcgaatctcgaaagcctatctcagttcggattggaggctgaaacccgcctccatgaagttggattcgctagtaatcgcgcatcagccatggcgcggtgaatacgttcccgggccttgtacacaccgcccgtcaagccatgggagccgggggtgcctgaagttcgtgaccgcaaggagcgacctagggcaaaactggtgactggggctaagtcgtaacaaggtagccgtaccggaaggtgcggctggaacacctcctttctggagctttatttcaaaggtaagctgcttgattcttcaaagaaagttctaacagcacacgcgtaaggcgtagcagagcgaaactgcggtgctgttcaacgcaaacttcgggtttgcatcgttcattgacacgattaaggagatgagatataggctatgcatatacaatagggtatgcatagcggaaaaagaaagtaagtaagggcgtatgggggatgcctaggctcttggaggctaagaaggacgtggtaagctgcgaaaagctgcggggatttgcaaacgagactcgatccgcagatatccgaatgggacaacccggcaggtagaagacctgtcacaccgcgaggtgagctaaccctctgaactgaaacatctaagtaggaggaggaaaagaaagaaacatcgatttccaaagtagcggcgagcgaaatggaagaagcccaaaccgatattgttacggcaatatcggggttgtaggactgcaatattcaattaacaatgaactggaatggtctggaaagtccatccatagagagtgaaaggctcgtacaggtaagtttgttatgcgatagcagtatcctgagtatggcgggacacgaggaatcctgtcagaatcagccgggaccacccggtaaggctaaatactcccaagagaccgatagtggaccagtactgtgaaggaaaggtgaaaagaaccccgaacaggggagtgaaatagaacctgaaaccatacgcttacaaccggtcggagcagcttcgtgctgtgacggcgtgcctattgaataatgagcctacgagttactaatcactagcgaggttaagtgcaaggatgcacggagccgaagcgaaagcgagtctgaacagggcgtttagttagtggttgtagacgcgaaaccttgcgatctacccttgagcaggttgaaggttgggtaaaaccaactggaggaccgaacgaataagcgttgaaaagcttctcgatgacttgagggtaggggtgaaaggctaatcaagctgggaaatagctcgtactccccgaaatgccttttggggcagcgttgtaataaagagtctactggaggtagagctactgattggatgcgggggcttcaccgcctaccaaatcctgacaaactccgaatgccagtagtatgatttacagcagtgagtgactgggtgctaatgtccagtcgcaaaagaggaacaactcagaccagcaactaaggtcccgaagaatatgctaagttgatctaacgatgttttgttgcagagacagctaggatgttagcttggaagcagctattcattcaaagagtgcgtaacagctcactagtcgagcgacagagcgtggataataaacgggcatcaagcatatcaccgaagttctgggcgcgagagcgcggtaggggagcattccattcagcgtcgaagcagtttcgtgaggaattgtggagcgtatggaaaagcaaatgtaggcatgagtaacgataatgcgggagagtaacccgcacaccgcaagaccaaggtttcctgatcaacgctaatcggatcagggttagtcgggtcctaagggtaagccgaacggcgatctcgatggataatcggttaatattccgatactaacatatacctcgatggagagacgaaggaacgtaagtgccgccacctgacggaataggtggttaaagggcgtaggtataggggcagattaagagttagtccttgctgaaacctgacagtacagagagcctacgggcaatttgatagagcacccaagtcgacttccgagaaaatcttctaagttatagtatatgttacccgtaccgtaaaccgacacaggtggtcgaggagagtatcctaaggtgctcgagtgaatcacggttaaggaactaggcaaattaaccccgtaacttcgggaaaaggggtccctatgaaagtagggcgcagcgaagaggtccaggcgactgtttatcaaaaacacagggctctgcaaattcgaaagaagacgtatagggcctgacacctgcccggtgctggaaggttaagaggggatgtcatcgcaagagaagcattgaatcgaagccccagtaaacggcggccgtaactataacggtcctaaggtagcgaaattccttgtcgggtaagttccgacctgcacgaatggtgtaacgatctggacactgtctcaaccgtgagctcggtgaaattgtagtcccggtgatgatgccgggtacccgcaacgggacgaaaagaccccgtgaacctttactatagcttaacgctgaatttgggtacacaatgtgtaggataggccggaggctttgaagcgggcacgccagtgttcgtggagccgacgttgaaatacggccctttgtgtatttgagttctaaccctgcgaaggggacaccgtttggtgggtagtttgactggggtggtcgcctccaaaagcgtaacggaggcttcccaaggtaccctcagcacgaatggtaaccgtgcgcggagtgcaatagcataagggtgcttgactgtgagacatacaagtcgaccaggtacgaaagtagggtatagtgatccggtggttctgcgtggactggccatcgctcaaaggataaaaggtactccggggataacaggctgatcgccgccaagagctcatatcgacgcggcggtttggcacctcgatgtcggctcgtcacatcctggggctggagaaggtcccaagggttcggctgttcgccgattaaagtggcacgcgagctgggttcagaacgtcgtgagacagttcggtctctatctgttgcgggcgtaggaagattgaggggtcctgactttagtacgagaggaccgagttggacgaacctccggtgtatcggttatgctgccaagtgtactgccgagtagccgcgttcggtctggataagcgctgaaagcatctaagcgcgaagccatccccaagataagtcttcccttgaggggcgtaggagactactacgttgataggctgcaggtgtaaagacagcaatgtcaaagccgagcagtactaattacccgataggctttctttttcgaatctttatctcatctcctgtacgtgtcaaatttaccggatgcgacggattatatatcgaaaagatatattcgcatagttccgatatattggagcaaaagttcttttaggtggttatagcagtgaggttccacctcttcccattccgaacagagaagttaagctcactaacgccgatggtactgcgctacgcgcgtgggagagtaggtagccgcctcttcaagccggatcctgaacaagggtccggctttctttttgttcgcgggcttgcgtgtcccttcccctcgtgcggttggctctcagcggcagagcctgccaaggagggttatgtcggtttagaggttgatattttgtgcctggaggttggcgtgggcatacgctttacagcacgtattcgtagtgggggggcggtttataaacgcagccaaaagccgggaatgatggcgcccgaatccgaaatcctgttaatgagctgaatatcgtttgaaaaatagagagaattcgttaaattgtcttgaaataaaatcaatatagcgtttcttagatggggccatttagagatagatgctgaaaaatagattcggttatgaagaaaatattttgtttagtttgttttttctctgctttattttcgttgaaaagcattgctgctgttcctgagggagctattccgtttgttttcgacggacatctgtacctgcaatcgaccttgaatgatactattcccgttacccttatttacgatacaggagctgactttctctatctcgacgaagattatttgaaactcaaaaatctgcaaaacgctttcggacgaaaaggtaaggctaaaatgggaggtgcggggaatggcgagcctgaacgcatagaaatattcatcgatccgattacagtccattgcggggcgagggaataccaaaacgagattacacctataattaagttgcgtgatctcctcgggaggcacactgacggcttgttaggtaatactcatctattgatgaatcctctggaaatcaatttcagcgagagctatttgcgccagttaaaagaaccgttgttagctgaacagctcgataattatgtaaaactcgacgctcgattcgaggataaccgtatcgatgtaaaggcgacgctgcaaatcgacgatgaaaatagcctggagggttggtttagaatggatttagggtgcggctccacgattattctcacgaatgaaacggcgtctgcattcaattttatggatgtgccgaaggcatattttcgtacgcaggccggaggtatcggcggcggttctgaggaggttacgataagggctgcaaaattctgtatggtcgatacgctcgaaaatatcgtgatagattactcgctcaatgaaaagggggcattatcgtcggacagaccctatataggtataataggtaatgagatctggtcgctctacgacattgttttggatccggtaagttcttctgtatgggtcaaacgcaatgagaatcagggtacctacgcccaatcgtcggtgacgcatatggttactggtgaccgtacggatatttgcggtggctggattgtcaatggcctatataaaggaggagtcgcggagcaagccggtatcgaaatcggtgatataattgtagccataaataatcgtcctgtcaaagaaataacctgggaagagcaacgaaaaggtttggaacttcagggagaaactacatataccgttcaaaaacccgacggtcaaatcgtttcctatactttgtttattggtaaacagattatctgacccaactatatcccatatagtccggagtttgctgtttccaaaaaaattgtggaaaggacgagtatatgtcgatatggaatcgggaccgaggacgatcggtaaagatgccgctcgctgccacgggccggtttgaatgtatgatccatattattcgccgaaaaactcgcggataattccgtatgttttgtaagtttggggataattatgtgcgactatgaaacatccggtagatattgataattggaatcgtcgggagaactatctttttttccgggatttcgccaatccttattacagtgttacatcgcaggtcgatgtaacggaagcgtatattcgggcgaaagcgctgggtatcaagttttcgcactatgcgatgtacgcttcgatacgggctgtcaattccattgaggcattgaggtacaggcaggtcgatggaaaggtctggctatatgatcggatcaggctcaatacggcggttgcgcgtgaggatcactcctttgcatcggttatcattccctataatgatacgctggaggagttcgtcgctgaagcgcgagggatcattgcagccgcgatgcggggcgagggagatgcgtacggagccgattccgagaaggacacgtttgttataagtgtgaatccgtggtatagcttcacagggttacagttccagtttccgcagaatgcaggcgagaatatccctttgtcggtattcggaaagataatggtcgatatgcagggacgccgtacgatgcctgtggctgtaagtttccatcatgggtttgtcgatggttatcaggtggggcgttattgggaggcgttccaacataatctcgatacgctctcgatgtaaaatacacgatccgatttcggccggagttttacggttgtctaatagggacaggtagggatataggggaactttgagggggacataaagaattatccgggtattatcgtctgtaagttgtgtcttgcggcgaggtgattttttgagaggtctatcgcggcgtcagagggtcttatggatttatactgctctccaaaggaggcttttagtggcttatcccttgtaatggggatggttttctgtgttttttagccgattcaggcgattgtgaaagataatgaatagaacgatctttgtattgtgaaaagggataagtgttaatagggttgatgaaaggttagaaaaatttttgccaagaaattttatttgttaaagattgtgtgtggaaaagtctgctgggaagcaggcttttctgtttccgggaggcgacaggggccggcatttcaaccggtatgcaggggcggtcgcgttcaaatgccggaacaagtcgatcgccctgtcgcggcaatgcgatcgggggattcgttgctgctttgctcattgtgcggtcgtatagtcggtaattcgtcggtgttgcggcaggacggtttcgggggatgcggatatctgtccgggattttgcatcgagctgtgtcacgcggcccgtgtcggtgcgtgtccggtgccggagtgcggtacgaggtgctcggcttgccccgggactcgtctttgctgtggcaggtgcgggtcgtgccgaagatcgatgtccccggtacgacccgcacgggccggagagtcagatgcgcggttttacggcgatgcgcagcagcagcgacagtgcgtagataatcaggccgtagatcggagcgatgaacgccacgcgcagaccgcccgagagcagcgtgaatgtgacggagtatccggttgtctggatgatttggagaatggagtaaaagccgatcatcatactcaacactccgagggtgcaggccagcaatccgagctccttgatccagcgcggcgctttccatgtgcagaagagcatggcgatcagacagagggtgagtgcggtcatccagccgtagccgccttccaggtagagatcggccggtgaatgtcggctttccgatattgcaaattcgctgacctcccactcttgtgtttcgggattcagaatggcgatctcatgctcgttcagttggggctctttccccggttcggtcggtaatgtgcgggtgatctcttgggcggacgggagggcggttttctcgccgggtgtcgccgatgtcgattcggcatcggccgcagccgatgtgtcggcggacggaggcggtacgatggcgaccttttcctgtgcgaagagcgggaccgaggccagcagaagcagtaggccggttgcaagcagtcgtttcattgcgtaatgattttaggtttgacattgagtggatcgatcctattgcaaaggtagggagactcggctgcaaatccaatgtcgaatcccgctctttgccggtcgaaagccgctgttgcgtcccggagaggttgcgttgcgaccggaattttgctaaatttgcaataaacggctgctgcagggcgtactccggtgttcggtttcgccgactggacgcggtctgttgcgggcctttgtgcgaaaacgacggatatgagacattcggtgatgatcggctattggtgcgtggtggtactgatgctcgcttcggtgatggcgagctgcgggtatgagtttcggcagggggtgttcctttcgacgacgatgttgcccgggatgttctgcgccaaactgtcgttgccgggggcgctgcgtgcttcgaaccgtcgggccgtggcggtcgccggcgttgcgggtggcatactggtcatcgaatggctggcgttgctgttggcgcatcgctatatctggagcggttggttgcccggtgacgggatggttttccacgttcttttctacaatccggttttcatcgggttgctgctggctgcggtccttatccccgagaggctgctggaccgctggataaaagcgcggttgccgcggatggaaacagtgagcttcatctcggagcgccgcaaggtgacgcttccggtcggcgaattgctctatgtcgaatccaacgacacggaagtgtttctgcacacggcggacggcgggctctatcctacgcgaacccggatttcgcagtgggagcgtttgttggacgatcggttcatacgcatccaccgtgcttggctggtcaatgccgagcgggtgtcccgggtcactatgacggatgtgaccatagagcgggtcactctcgaagtttcccggaaataccgcaacgccgtcgccgagcgtttcggactgcataagcctgcgcggtaacgttcgttccgtcattttcctatcctgtccgatgcggccttgtgtcgattggatacgaatgtgcgtatatatgcaaaaaagcgtcccgtgaagggacgcttttcatttcgaggggcggttattatttgcccatgtagtttttcacgtagtggtggtgctgtccgtagcgctcgaatgctgcccggtccagggattcctgggccgaaggatcggcgatcgagatgatcagccgcgcacgctcctgcaggcttttgccgtagagattgacggcgccgttttcggtgacgaaccagtggatgtggttgcgggtggttaccacgcctgcgccgcaggtcagttccggagcgatcttcgagatgcctttgttggtcaccgaaggcatggcgataatcgccttgccgcctttcgacagcgaagcgccgtagatgaagtctatctggccgccgacgcccgaatagaatttcgtgcccagcgaatcggcgcaaacctgaccggtgatatccacctggagtgccgagttgatggccgttacgcggtcgttcttggcgatgatgaacggatcgttggtgtatcccacgtccatcatcagtacgcccgggttgtcgtcgatgaagtcgtaaacccgctgcgaacccatcaggaaggtggaaaccatcttgcccttgtcgatgttcttcgcttcgccgttgatgacacccttctccaccagcgggagaacgccgtcggcgaacatttcggtatggatacccaggttcttatggttgccgagctgtgccagaaccgcattcggaatagcgccgatacccatctgaagcgtcgcaccgtcttcgatcagggccgcgcagtgcttgccgatgcgggtttcgatctcgttgggttcggtgaaatgcgcctcttccagcggggtatcgtcctgtacgaagaggtcgattttcgacgagtggatcatcgcgtcgccgaacgaacggggaacgtgcttgttcaccaccgcgatcaccgtgcgagccgtttccacggctgccagggtcgcatcgaccgaggtgccgagcgaaacgtagccgtgtttgtcgggcgtcgatacctggatcatcgctacgtcgcaaggtaccgtgccgctgcgatagagcttctgggtttcgctcaaaaagacgggaatgtagtccgcataaccgctctgcgtcactttgcgcacgttcccgcccacgaagaacgagtcgagctggaagatgccttcgaactgcggatcggcatagggagccggcccttccgtgtgcaggtggtggatgtgcacatccttgaattcgtggttggcgccgcgttcgcacatggccttaatcaggcactggggggccgaagcgaccgagctgaggtgaatatggtcacccgatttgatgactttcacggcttcggctgccgttgtgaatttaatctgagtgttcatttcttttttcttattttagataagattccttgcattcggttagttgcgttttacctcgacttgctcgtaaccttcgatgacatctcctacgcggatgtcgttgaaggattcgatgttcagaccgcagtcctgacccgtgagcacctccttgacatcgtccttgaaccgtttgagcgagccgagcttgcccgtgtagatcacgataccgtcgcggatcacgcggatcggggtgtggcgggtcagcttgccttcgcggacgacgcatccggcgacggtgccgactttggaaattcggaagatctccatgacttccgccgagcagacgatctcttccttcatcaccggttcgagcatgccttcgatggcatccttgatgtcgttgatcgcatcgtagatgatcgaatagaggcggatttcgatctcctccttttcggcgagcttgcgtgccgatgccgacggacggacctggaagccgacgatgatggcattcgaggccgccgctaacagaacgtccgattccgagatctgaccgacggccgagtggatcacattcacctgcacggtctccttcgagagcttgatcagcgaacccgacatagcctcaaccgaaccatcgacatcgccttttacgatgatattcagctccttgaacgatccgatggcgatgcggcgtccgatttcgtcgagcgtcacgtgcttctgggtcatgatgccctggatacgctggagttgctcgcgtttgttggcgatttcacgggccgagcggtcgtcctccatgacgttgaacgtgtcgcctgcctggggagcaccgttcagaccgagcacctgtaccggcgtcgaagggccagcttcggtcactttttggccgttttcgttgaacatcgctttcacacggcccgtgtgtatgcccgaaagcattacgtcgcctatgtgcagcgtaccgttttgtacgagcaccgtagctacgtaaccgcggcccttgtcgagtgtcgattcgatgacggctcccgaagcgcggcggttcggattggccttcaggtcgagcatttcggcttcgagcagcactttttcgagcagtttgtcgagattcaggccctttttggccgaaacttcctgatcctggtatttgccgccccacgactccacgaggtagttcatctgcgaaagctgctccttgatgtggtcggggttggctgcgggtttgtcgatcttgttgatggcgaaaaccatcgggacgcctgccgcctgggcgtggttgatcgcctcgacggtctggggcatcacgttgtcgtccgccgctacgatgatgatcgctacgtcggtgatcttggcaccacgggcgcgcatggcggtgaaagcctcgtggccgggggtgtcgaggaacgtgattttctggccgttcagctctacactgtaagcaccgatgtgctgggtgataccgcctgcctcaccttcgatgacgttggttttgcggatgttgtccagcagcgaagtcttaccgtgatcgacgtgtcccatgacggttacgatcggcggtcgcggcacgaggtcttcctcgctgtcctgttcgtcgtcgccgatggcttcctggatgtccgccgatacgaattcggtcttgaagccgaactcttcggctacgaccacgagcgcctcggcgtcgagacgttggttgatcgacaccatcaggcccaggttcatgcaggccgtgatgacctcggtcgccgaaacgttcatcatcgtagccagctcggctacggtcacgaattcggtgaccttcaggatggagcgttcctgctcttcgcgctggaattcttcgttcatgcgctcggctacggcttcgcgtttttccttgcggtatttcgaacctttgctcttggcgtttttcgacgtcaggcgggccagtgtatctttcacctgcttcgaaacctcctcgtcgctgatttcgggacgaacgacgggcttcggagctttgagtttgtccttgcgggtcttcttgttctctcccggacggggttggttggattgcgggccttgtccgcggctgggctgtgcggcggatttaccgttgctgcccggcttggggccgcctgccggcgtacgggtcacgtccactttctctttactcaagcgtttgcgtttgtggcggttgcccggtgtgaatcccgatacgtccatcgtgccgagtacctgcgggcccgtgagggtctgcacggcggggcggaagatgttgtcgctcttgggcgccgcttccggttcgggtttggctgcggaagccgtttcggaggcaggtgccgcttccgttttgggggcggccggttgcggtgccggctgcggtttcggagccgcagcctccggtacgggctctgccgccggtttgcttaccggtttcggagccggtttgggcttgggcgaaagatctattttgcccagaattttgggctggggcagttcgtccttgacgctgatgacgttgcttttgataattacctcctgctcctcttcgcgcgtctgtttctgtgcctcttcgagggtgatcgtagcctgcttctgggagattcgctcccggatgctttcccgttcgttgccggtaattcggctcccgccgaattccttctccagaacggcatagacgtccggttccaccagcgtattgggcgaaccgtcggtttttatacccttcttttgcaggaagtccgtgatggtattcaatcccaccttgaactccttggcaacctggataagtcttaattttctttcgttactcatatatcggttttaatttttgtgcgatgggacggattactcctcgaattccgctttcagtatctcgacgactttctgtgcctgttccagctccaggtcggcacgggcggcgatctcttcgacgggcagttccagcacgctcttggccgtgtcgcagccgcaggctttcagggcgtcgatcacccagccgtcgatctcgtcggcaaattcggtgagtgcaacgtcttcctcctcgatttcgcggtaaacatcgatatcgtagccggtcagcatcttcgaaagccggatgttcaggccgcccttgccgatggccagcgatacctggtcgggcttgagatagaccgaagctgtcttcttctcctcgtcgatggtgatgctcgaaatcttcgcggggttcagggcacgctggatcattaactgcgggttggtcgtgtagtttaccacgtcgatattttcattgcgcagctccttgacgatcgagtagatgcgcgatcccttcatgccgacgcaggcaccgaccggatcgatgcgttcgtcgtaggattcgacggctaccttggcacgctcgccggggatgcggacgatcttcttgagggtgatcagaccgtcgaaaatttcggggacctcctgctcgaagagccgttcgaggaactggttggccgtgcgcgaaaggatgatgcgcggctggttgttgttcatctcgacgctcttgacgatcgccttgatcgtgtcgcccttgcggtaatagtcgttgggaatctgctcggtcttgggcaggatcagctcgttgccctcgtcgtcgaggatcagcacctctttcttccatacctgatatacctcgccggtgatgatctcgccgaccttctccgaatatttttcgtaaaggttggccttctccagatcgaggatgcgcgaagcgagattctgacgcagcgacagcacggcccggcgtccgaacgattcaagtttgatcggatcgacgtattcgtcgcccacttcgtaggtcggatcgatggccttaacctccgatacggcgatttgcatgttcggattctccaccgcgccgtcctccacgaccgtacggtttcgccagatctccaggtcgcccttttccgggttgatgatcacgtcgaaattctcgtccgtctcgaactgcttctgaagcgcgtggcggaaaacgtcctcgaggactccgatcatcgtggccttgtcgatgtttttaagctccttgaactctgcgaaattgctgataagattaagattatccattggttttttatcttgtttatttttgaatttccactatttgaaatcgaggtattccttcgtgtatttgatctctgagaaagggtagcggcgcgtaacccgcaccgtctgtttccgctttttaccctctacggcctgcttctcctcgtaggagagggtgagtccctcctggtccgcctcgtcgagcgtcgccagaatcttcacgccgcttttgagcagcacttcgaccggcttgccgatcagtttgcggtattggcggaggtgcttgagttccgagccgatgcctgccgaagctaccgtgagagagaaatcctccgtgtcgcggtcgaattcggcctcgatcgcgcggctcagctccacgcaggtttcgatacctaccgaggtgtcgctgtcgatcagcagttccacttcgttggcgggcgaacaggtgcaatccactacgaacaggtcggtgccgacgagtttggcattggctatttcggtgattttcgtacaatcgatcatatttgctgatgttatcaataaagtcgtttttcggtgcgggcggtccgtgcaaatccggacctctgtccttcctcggcgaaaacttgaagttcgttcagtcgtttttgcggccggcccggaggcgttcggctttttgacgaaaatgtagggaatcgtcgcttcccgttcgttttcatcgtcttgcgtcctgcgttttcttcgaacattgcatcgcaaggagcactattcgcgcccgaatcttgtccctgttgtagcaggagctgtaatcgggtccccgcatggcccgcaactgccggtttctcccgacggaatgggcatgcgagggcatgcgggtcgagaaaatcgtgcggatgattcgccggtcgggagcggtgaatatatctacgaaataaggggacttgctcgtccccttacctctttatacccgtttacgctacaaatatagcgaatgttttcctattttcaaacctttgtgttgaaaaattattcgtctttttcgttgctcggagagtagggcttgataatgccgcgctgcgattcgcggatgaaccggatgagtcggtcgcgttcgggactttgcggaatctgtttttcgacctcctcacagccgttcaggtagttcaggccgctttggaagaggatgcggcaggcgtcgtgaatttgtgagatcgtttccggcgtgaatccgcggcggctcagaccgacgcgattgacgcaggcgaaacgtaccggatcgttgttgctgacggtgatgaaggggggaatgtccttgcccaccagcgcgccgccctgaatcatcgtgtgctctccgatgcgggtccactgatgtacggctacgtggccgccgataacggcccagtcgccgacttcgacctctccggcgagcgatacgcggttggccatgacgcagtggctgcctaccacgtcgtcgtgggcgatatgcacgtaagccataatcaggttgtggctgccgacgacggtcttgccccgggaggcggtgccccggctgatggtgacgcattcgcggatttcgttgtagtcgccgatttcggccgtcgttttttcaccgacgaacttcaggtcctgcggggtgcaggcgatcgatgcggccgtatggatcttgcagcctttgccgatgcgggctccgtcgtggatcacggccccggggccgatccagcagtcgtcgccgatcaccacatcgccggcgatgtaggcgaaaggctccaccgttacgttctttccgagtttcgcgtcgggatggatgtatgcctggttgcttatcatgtgcggttactctttatttttaacgatctgggccatcatcgtggcttcgcaggcgagcgtttcgccgacgaaggccttgccttcgactacggctacgcctcgtcggatgggctccagcagttgaacttcgaaatgaagggtgtcgcccggaaccaccttgcgcttgaattttacgccgtcgatcttcatgaaataggtcgagtagtgctccggatcaggaatactgcgtaataccagcataccgcaacattgcgccatcgcttcgacgatcagcacacccggcatgaccggctcttcggggaaatgtcccacgaagaacggctcgttcatcgtgacgttcttgatgccggctaccgtcgtgtcgtcgatgtagaagatgcggtccaccagcaggaacggcgggcggtggggcagcatgcggcggatatcgttgatgtcgtaaaccggcggtttgcggcagtcgtattggaagcggggtttctctccttcgcggcggatagtctgtttgacttgcttcatgaactccgtgttggcgaaatggccggggcgggtagcccatacgcggcccttgatgcgtttgccgagcagagcgaagtcccccagcaggtcgaggagcttgtggcgggccagttcgttgttgaaacgaagttccaggttgttcaggtagccgcccgtgatgcggatatcctgtttgttgaagattttcttgaggtgttcgagctgatcgtccgggacgggattctccacaacaacgatggcattgtccaggtcgccgcccttgatcagattcattttcatcagaggctccaggtcatgcaggaagacgaaggtgcggcagggcgcgattttcgaggcgtagtcgtcttcgggattgaaggtcgcgtactggttgccgatcaccttggagttgtagtccacgtgcagcgatacggagaattcgtcgtcggggtaaaggatgatggccacgcctttttccggaatcgtatagaccattttttcggtgacgtggtagtaggtgcgttcggcttcctggggttgcaggccggtttcgacgatcgttttcgcatattctttggccgaaccgtccatgatcggggtttcgccggcatcgacgtcgatcgtggcgttgtccacgcccagggtccagagggccgacatgatatgttcgatggtcgcaacgcgtgcgccatccttttcgatggtcgtaccccgcgaggtatccgtgacatagtcgcacagggccggaatttcgggtttgccttccaggtcgatgcggcggaaaacgatgccgctgttctccggggcgggatgtaccgtcatcgtcactttgacgccggtgtggaggcctgtacctgaaaacgagatcggggctttgagggtttgttgtttggcagccataatctgaatttattcaaatcgcaacatacattcccgctgactgccgggtcccgacgtgtgtggggccgaccgtcattttcggaaatgtttatcgcattatttgcgcgcaaatataggaaatattattcaaaaatcgtatttttgcctaaattattgataaaccgaaattccgtggcatcacccgacagaactcctcgtcctccgaaattgcagcttcccttcgagcagaaaaaaaccgatgcgggagaatgggcttacgaccatcggatcggattgtgtgtcacgttgattgcctatttggtgcttgcgatcgcctttatggtgggaaaaatcgtcgtgggggccaaaccttccgtgcaaggcataatcattgatacgaaaactttagcggagctcgaggcggagaagatgcgtcttgaacaggaggtacgggcccgccaacaggcgcaggaaggcggcgattggcgggatgtgcgcaaccagtactccaacgagaatgcgctcgaggagcggtcgcgtgacgaccgtggctcgatgtcctcgtcgctgaaagaatccgccgaagcggtcggcgaacggatgcaggccaaccgggacgcttacgagcagggattggccgaggagcgtgcgattcgggagcgtatggggcgcagcggcaaggacgatcggacacaggacagtcgggccaggggacgggtcacggtttccttttcgctgaccgatcccgtgcggacgcgccgttatctggaggtgccggcctatcagtgcgagggaggcggcgaagtggtcgtcggtattacggtcaatccttcgggagaggtcgttgctgcaaaagtggcctccggaggcgatgactgtatgcgggaggctgcgctggaagctgcacgcaactcgcttttcaatatcgatgattcggcgcctgcccgacagtcgggaacgattacttacctattcattcctcaatagggtgcggtgcctgtcagcgattgtacgcgacaggcatttttttgtaaatttatataaggatttcctatgcataatatcattacgaccgaaaacattctgttgatcggagccttgcttcttttcgtcgcggtaatggccggcaaggcggcctatcgtttcggcgccccggccttgctcttttttctgggggtcggtatgctgttcggcatcaatttcatttcgttccattccgtcgaagcgacccagttcgtaggtatgatcgctctttgtatcatccttttcacgggcggtatggataccaagttttcggaaatacgaccggtgatcggaccgggtatcgtactggcgaccgccggagtcgtcatgacggcggtgatcgtagcgggtttcgtcacgctcattgccccatgggtcgggctggccgtatcgtttcctgcggcgctgctgctggccgcgacgatgtcttcgacggattcggcttcggttttctccatcctgcgaagcaagaaacaggggctgaacgagaacctgcgccctctgctggagctggagagcggttcgaacgacccgatggcgtacgtgctgaccattgtgctgatcggcgtattgtccggcggtgcggaggccgtgagcgtaccgatgagtatcgtgaaattcgtgatccagatgcttctcggcggtttgatggggtatgctatcggtcggatcggcgtatggaccattaaccgcattaacctgagcaactattcgctttacccggtgcttttgcttgccttcgttttctttaccttctcgtttaccgacctgatcggtggcaacggatatctggccgtctatctggccggtttggtcttgggtaataatcagctgacgcagaagcggtcgcttacgatcttcttcgacggcttcacctggctggtgcagatcgtgatgttccttacgctgggtctgctcgtcaacctcgacgaactcttgcagcccgacgtgctgatgctgggatgcctggtcggggcttttatgatgttcattgcgcgtcctatcacggtgttcgcctgtatgatgcctttccgcaagttcacgaccaaagcccgtctttatgtttcctgggtcggtctgcgcggtgccgtgccgattatttttgcgacctatcctttgctggccggtacggagggggcacggctgctgttcaatgtggtttttctggtgacgattctctcgctgctggtacagggtacgaccgtgagctggatggcgaatttgctcgggcttgggtatgccgaaaagagtcctgccttcggggtcgatgtccacgaagatattccgtcgatatttaccgaggtccttgtcaatgaatcgatgcttcaggggggcactacgctcaaggagatcaacctgccggagcatacgttggtgatgatggtctatcgtgacggggactatttcgtcccgcagggcaataccgcgctgaaggtcggcgacaagctcttggttatttcagaccggggcgaggagctggagtccacctataaggatatgggagtcgatgaagtgctgaaactttgagatatttcctgtaaggaccggttctctctgttatcgaaacaaaaaagctgtcgttttcgacagcttttttgtttcgaatatatctgtgaagattagatctcccaagtagcgcccgagtggagcaggtcgtccacacagtggatcttgctctgggctttcacctcttccacctgcttttcgacagcctgatcgtaaacgatttcgtcctcgaccgagcggattacaccgagtgcgaccggatagtcgggatatttcattgcggccagcatcgagtgcagcgtcgtgtctttggtgtgggcgtcgtgcgtcaggatcttgtccagcgtatagccgtcctgtccgaccgttacgactttcaggcgcatatcctcgaacaccagacctttttcgttgttggcgccgaagagcatcttctcgccgtggcgcagcgtgatggtgtgctccagacgggtagccttgtcgccagcgaaagccgcatgggttttgtcgttgaagatcacgcagttttgcagaacttcggttaccgacataccctggtgtttcgccgctgcgatcaggcactctttggtcagattcacctccatatcgatcgaacgggcgaagaacgtgcctttcgcaccgatcaccagttcgccggggttgaacggtttttcgaccgtaccgtagggcgaggtcttggtgattttgcccagcttcgaggtcggcgagtactgacctttggtcagaccgtagatctcgttgttgaacaggatcgcgttgaggttgatgttgcggcggatcgcgtggatgaagtggttgccgccgatggccagcgagtcgccgtcgcccgaggtaacccaaacgttcagacgcggattcgcagtcttcacacccgtagcgatggcgttggcgcgtccgtgtacggagtggaagccgaaggtcttcatatagtagatgaagcgcgacgagcagccgatgcccgaaatgaacgtgaagaggttgtgcggcgtatcggtctggtcggcgatttcgggcagggcccgctgtacggcattcagaattgcgtggtcaccgcagccgggacaccatcttacttcctggtcgcttttgaagtctgccggagtatatttgtaatctgccatggctttatttcagtaaagagtgaaacttgttcataagctcggtcaccgtgaacggctggccttcgcacttgttgtactgttcgtagtcgaattgctgcaacttaccgcgcaggtagttggcgaactgtccttcgttgagctcgcaaaccacgatcttcttgaaacgcttgaagatgtcggcgacgccgtgcggcagcgggttgatgtagttgaagtggcagagcgaaactttcttgccttcggcacgcatcttatcgacggcgttctgcaggtgtccgcgcgtaccgccccaacctactacgagcaggtcgccttccggatctccgtaaaccgtctggtgcgggatatagtcggcgattttggctactttcgcagcacgcaggttggtcatttcctggtggttctgtgcatcggtcgagatgctgcctttcagcttgtctttctccaggccgcctacacggtgctccagacctgccttgccggggaatgcccagctgcgtgccagtttctcgttgcgggcgtagggcatgaagggacctccgtcctcggttttgtcgataatcggcgggttgatggtcgggtaatctttcatcgaaggaatcttccacggttcggagccgttggcgatgaatccgtccgagaggagtactaccggcgtcatgtgctccatggcgatacgaccggcctcgaatgcgtagtggaagcagtcgctcggcatcgaagcggcgatgaccgctaccgggctttctccgttacggccgtagagggcctgctgaaggtcgctctgctcggtcttggtcggaagacccgtcgaggggccgccgcgctgtacgtccacgactaccagcggaagctcggtcattacggccagacccagcgcttcgctcttcagcgaaagaccgggacccgaagtggtcgtcacggcgaagttgccggcgaacgaagcgccgatggccgtacagatacccgcgatttcgtcttcggcctgtacggttttcacaccgaggtccttgcgtttggcgagttcctcgagaatgacggtagccggagtgatagggtacgaaccgcagaagaggggcagaccgctcttctcggatgcggcgcaaagaccccatgccgttgcgacgttaccgctgatcgaccggtaggtgcctttctccatctggcccgaagccacggtgtatgtattggcgaactgatgcgtattggcggcatagttgtaaccggcgtcgatagcgcgtttgttggcttcggctatggccggatttttcttcgcaaattttgaatcgaggtaacgctttgcatgatcctccggacggttgtagaggtagaagcagatacccagtgcgaacatgtttttgcacttgaccatcgctttgttgtccagaccggaatccgccaaagccgccttggtcatctccgtaatgttcggaacgaccacgttgaaatcttccaggttcagctcccggatcgggtcgagcgttgcgaaacccgctttccgaaggtgctcttcggtaatggagtcctcgtcgaggattaccgttgcacccggcttgagccatttgcggttcgccttcagtgccgcagggttcattgcgatcagtacgtcgcagaagtcgcccgggttgagctgtcttttggctccgaagtgcacctggaatccggatacacccgctacggtaccttgcggggcgcggatttcggcgggatagtcggggaatgtcgagattccgttgccgagcaaggctgaagtgtcggaaaagagcgtaccagtaagctgcatgccgtcaccggagtcgcccgaaaagcggatcacgacatcttgcagctcttgtaccttgttttcattcattgctgtattgtgaattagtaatataataaggttgctttattgggtcgttttctgtggccggcacggtttcgatcaattcgaccctgtcttcctttgtcgaaaacattataatataataccacaaatataggaaatatattccggataaaactcacaaatcgtaattaaaaaaatattgtttggttaaaactttgctttttttgtgctttttgtaattataaataggaagaaatcccggctgcgggtatcgcaaccggaacatttggaacgcagcaccgaaatccggtttcgggtacggcccgtaacggctcgcgcgatttcgtgctaccggatcgaattcatccggatactggccttgaccagggcgagggcccggatgcggtccacggccacctctttgtcggcgtgatgggggttctgactgacgagtttcacgtacccttcccgctcggatttttggatgtatttgaccgtgatgtactcttcgccgtcgatgtcgatcgagagcaggtacatgtcgccccagaagatgtcgccgatatccttgagctgtttgtaaagtacgatgtcgccgcttttgagcagcgggtacatcgagtcgcccacgatatagatggcaccgtcgcacttgggcaggttggggatatggatgaaattgacgggccgcgtctgcgcgtgatcggcgaagagcggcaccaggcccgccgtcccttctatggagtagagggggacgctttgcagcggcagcgtgttgtccgtgcggtgcatgtaggcggtcagatcgggttcggcattgaacatttccccttctccgccgtcgagccagtccggattgacattcaattcttgaaccaggatgttcttgttccgggacgagagcgccgccttgcccgtttcgatcatcgaaagggcggcctttccgatgcctaatcgttgagctaactgctcttgtgtcagtcctattgtttttctcaatagttttaagcgatcccccgtcatatcgtatcaaaattttttatggtaaatattttgattctcttgtattaaattcaaaaattgaacttatctttgtcttgcaaagttaaacgatttattttgtttatgcaaaatttttattgaactaaattcttttacgatgacctatccaattattccggagttatacggtatcgtcgctcgcaagctgttggatgaaatcggggagaagagtttctattccggctcgttttcattcgactactgctcgaaagagtgtcgtttcgtcgcctcgatcgtagtctatcgttcgaaggtgtgtctgcccgaaggcgacgccgatcgaatcgacgacctggttcccgtctggtgggaattccatacatccgaccaagcgggggaacgccccaacgatttctccttttccgagcttaaggagtacctattctgattcgactccgcaagaccgcacatcccatccggagcggcgcctcctgcggtctttttccgaacacattgttcttggttttcgatacccgctgcaacgggcggttccgtttttccgttgtcgttcgaaaagttgaacgctgttctgcgattgtcggatgcggcgattctggaatccggccgacccgtgcgtatcgaaaccctccgcctcccttcggcagcgccgtgccaccgggcggagcttaaaaactactgacctatgaatatagatgtattgaaggacttgtcccccgcagaaccggcttctgcgggggatttgcctccgttcggcctgtttgccgccggagtctatccctttctggagttccggtggtttcacgaggcctactaccgcgtactggaggcattcgccgccgggcgcgtccgccggcttatcgtcaccatgccgccccagcatggcaagagcgtcggggcttcgaccctgctgcccgcctacctgttggggcgcaatcccgatctgcggatcgccatcgcctcctattcggcttcgttggcttcgaagttcaaccggcgcgtgcagcgtatcatcgattcgcccgaatatgcggcctttttcccggaaacgaccatcaagcggggagccaggcctccggagtacctgcgtacggctgatgaggtggagatcatcggtcaccggggcggcctgctctctgtcggccgcgagggggcgctcacgggcaaccgtgtggactgcttcattctcgacgacctttacagaaaataatcaaaattgtcgcaaaccaactaatgaacgaaaaaatttgccttgtttttaatctgaaattttatgtataagggaaaacgccgcattttttcggccctttctccttaacctttatagatacgatgcaattcaactccaccgaattattttacaaactgcatcagatagttttcgcaaaatccagctaacgggaatttcactacctcgtcccgtccgtcgggtgtgacgtattggaataggattgtatcggctttcacgtggtagtcgaacaaattcaccttttcgcccgttccctcgatttgtgcctcgttagccgtcattgtgccgattatcccgtccatttcgttaagttcgcactttcatccaaatatgtattgtcgattctttgtaaggacaatttcgacgggctttgtaatgtctgccatattaggggcaaacatgtagataaatgtttcgggaaatatttcgtctttgggttttcctacaagcaggactattccctctgtttggctccatttaaccgccttttggattatctgcttatcctctcatgcgtcggtctttcattctgttttaggttgtttgtatctgttcattttagctaaaatttaattgttatttatctttataaagataagattattagtaaaataaacaaaataagaaagtgacaaactctgcaaaagggtcttatagactaaccttttcacaaagtctgtcactcggaaggtcagatgaaaattcaactattcgttaatttttcttctaacttatctgcgtatttcagcacgaattttcggaaatcatcgaaacttaattccagatcaaatgtaataggtgcatttacatcatctccgcttttatccataatatggatattctcaatgttttctacattgcaattcattatatcgaaccgatagtggcatattgagttacggatatgataggctatattttctattgaattcttatcaactccttttctgtgttcattcgctgtgattttggttgtatcaattccccagttttcataatcaactaatccatctacggatatatttttgtcatggtctgcgcattgttgcggcataattaagaggcccacacaacaattcataaagagggtcttttcagagttgcagttgtgttcgtattgaacaagaatttgtcgcgtgcgggaaataaaatcaatgcgattttgatagttactcataagttcttatttttattcatctaatcccgtaatgcttgcaaattttttccatcctgttgcttttttatatgcatcagtgcatcctgacggcactttcagcaccgaataaggattaatgttgtaaaaagtataatctttacatgtcggcggtatttctgtacctattttgaataatcgaaggttggaattgccataaaaagtgtattcatctattcttttgacttgtgtacattcagacatatcaacggtcgtaagatttattgccccatcaaaggctcccaaatcacgaactcctgagatagattccaattttgaacctttctcaaacgtaatcatttctaatgatgaacaacctttgaatgcggcaatttcaatcgtttccacacttgcgggaatctcgatgaaggttaaggctttgcagtctgaaagggcacccgaataattatctttgttctgataacctcctgtgatagatttcaattttgaacctttctcaaacgtaattgttctcaatgatgaacccttgaaagctgttccaaggctttctacgcttgcaggaatctcaatagtagttaaggatttgcagtctaaaaaggcacccaaaatcttataattattatcatgtccccctgtgaaagcttttaattttgaacctttctcaaaagttattgttttcaatgaaacacaacccttgaaattattaaaggtcatcgactctacatttacaggaatcgtcactttccatagattggaacaaccgctgaatgcatcatcaagaactgtcaaacctgtaaagtgtttcaattcattaaaaatctgaatttccgagtttcctgtgaatgttgtgccaagtgatgtaaccgttgcggcttcgtcataggataattcaagatctccattagtgtcccacattcccacacatagtttctttacattttcatctgcgaactgaataatattcgggtctaccgattgtcccgttttggaaatcgtgattaccgtaccatctgccaattcaaagtaaacattgttctcatcctgcgtgattttgatgctatctgcatccttgccgtcctctcccgtagctttgcctaattgcgtccaattcgttccgttgtcataggaaatccaccaatagccctctcgaatttcgagtttcggcgtaacaccatctgcaccatcactgccgtctgtcccctgtgccttgattttctgtccgtccacaatgataaattcaccgtccagcgtccaataatagatgccatccccgtctttcttcacaccgataacgggagtgtttccatcgacgccatccgtaccatctttaccgttataaatcacaatcgggttactcttggcgaacttaatcgtgtagcctaccaccttgccgttctcggtcagtgggtctacactcgtgatataatcgttgttttggagtgctgtcacaatcgtttgtaatgccgaaaggttggtattcgtttcgttgcaaagacgctgtaaggcttcaaaagcagaccatgtaggcagtttgatttgcgtaccgtcagccaatgtaaagattacatagtcggtgctggttttataatccacgcccgaaaacatggaatcgccaccaatgccatcttcacctgttgctttacctaactgcgtccaatttgctccgttatcataggaaacaaaccaataatcgttttcgattttgaattgcggggtcgtgccgttggttccatttgtgccgtctttaccctcggcttggatttttccaccatcgaccatgataaattcaccgttcaacgtccaataatagacaccatcagtatctttctttacgctgatagtgggtgttatcccatcttcaccgtcttgtccgtctttaccgtggtagatggtaatagggttacctttgctgaaagtaattgtatagccgatttctttgccgtctttcataagaggtgtagtccccgtaacatagacgttgttttgtaatgctgttacgatagtctgcaacgatgaaatatttgtgttcatctgcttgcagagttcctctaattttgcgacacggttttccaatccgtgaacgctgttccaaaggtcatcatcatcgtatttacacgatgtgagcgcaaccaccgcaaataatgcggcaaaggccaatagttttttcatagtaagatttatttaagttgaacaagtgtttcaaatcttactatccgtccctcgatagtggcttatgtgcaaaagaaagcgcaggactgaaagcctattatagttaagcgggttctgacaaaaccttgacaatataataagcaacagccccacgcctatccgtaaggatatgacgcggtagatgttcgcctattctcttgtcttttgaactgtcagattcgcttaacgagaacaagctacactttccgtgtattcaatatgttactgcaaaagtagcatattcggcggaaattgcaaaacatcttgccctttcgggtgctgttgccgtatttaattgtgcaaagttcttgaaaacaaagtttctatccaatagcagggagtatggaatcgaaactttgttagttgtaagttgggttaatcgttcccgcaaatttcttgtattacgccgtccatgtaaatcgcctgcccgctcgtcagccgtccccaccaacgacaccctaatttgtcaatgatgatttcgccctgctctttcagtcgttcggccagccacggagtaacaagccaccattccagcacctcgtccccgttaaagggatagatatattcctcgtcgattttccccgcttggatcagctcctcgataaccgtgctttgtccccataaaacatggatgtccgtaatccgtttggctctctcttgtgtttcgtacatagcgattaagttttattcttcggttattagtagtaatccaacttcatgtaatatcaataatcttatgctgttagatggtttcgggcatgaatagggggcggtctgttttatgtggaatcctattatatgtaatggataaaaattcgattttccatctgaaaagggggaggggtgaaaaagtgatagtatcttcatggtcggcctatcaaagcaaaacgccccgactataaaaatcggagcgtctgaacgaaagtatattatgtgagtagaaaagattgtaaatgtagcttattggcctttatcgggtcttgggtgcatagcaccttaacgaaataagccagcgacacggattcgggaatcatcttgcaccgttcatttagggcataagtaaccgacagcgaattatcagccgacagattcggaatgttgtatttagtaagaatccgattcattgcccgttcatttcattgcggcggatttgttccctttgttaggcagaattgacatatttcattatagacggcgtgtgccgtatctttctgcggcggatttacaaagcaatcatccgttatttcgtagccgttcggtagggccttaatcagtcctaatccgttactctctttaataagagtggaaaccgtgttgcggttcattccgacagcatcggcaatctgtccgatatttcaaaggatagtattcgtattattaagacatatagcctttaatatgagtagaaagcccgcgattttcggcggatggttctttgcaaagaatcggttatccacgaaaaagaaatccgtttggggattggctatataataggaattacggcgtttgcatccgtcgattatgcgggttgtaacctgcattgctccgcactcctccaatcgttggacagaccgtttgacggtacggatatttactcctgttatttgggacagcctatcttccgttatatggcttgtttgtgtcttgtagtccgatttgcatttaatcgttgctcaaacgtaaatgtcagtcggtttgccgttgcccgtctgaagctggcaaattgattttggaatcgttgtataattcatcgttagcgacgtaattagtaaatagtatctcttttgtttttaataatttccgaaagcaggcggagcctaacgcggctttggcggcttttcggttgtcgaatcatttgtgttgcgttacatagtacagcatagtctgaaaatcgggtttgaggctcttcagagccgagagcctaaattaggtgttggttgggtaggtagtggtataagtgccacttttgagcacgaagcaggggacagatttaggcatcgcccttatccctcttgctggcttctgtaaaggtacagaggttattttcagcaaacaaatgaatcggggaattctttatcgggagccgaaatgagggcttttcagcgaaattcgctaaatttggaaataaaataatttggattatgagtattagaaccgacgatttaggatttgtcttttatgaagccgacgaacaagaagaaaaagagttggaatatgtatatgcgattaccgattcttggaattatatgggtgatgaagtcatagacactttcccacgcagattttgggatagggtctgtcaggagaagataaaagccccgtttacaaaagaaatgtttttgcaggaaacggatattatagcgacaattaaaggctttggattggacgtaaataaattttggtgggctgtgctgtttgtttatgattggtcgattgaaaagtttaccaaatgtttttgggttaaactcccgccaaaatcattaaccaaaatattagactatatcggagattcaaaagattttgagattacattccgagtaaagggtaaaaagagccgcgaagcagacccaaatgtaaaagcagcagttatgtatggattaaggcaaaaactcaaagagtggaaagacaaggagttttaccgcataatagatcattctacctacacaacgacattcacaaattcatcctattatatgtgctttgcagcggataagttcaaacatctgttcgatgctttgaaattgccgaatcgaggtgcggcgaatgaacacagatgcgataaagaggtatcttataataaaatgttgcttatttcccgtctgttctattttatgcggctgacacgaaatgtaaactttaaggatagcgatgaatcgctgaaaggagtgctgaaaacctatgcaaacaagctgccgcatactgaatccgctatctatggattttagggagtaggaaatgggctgttttttactccctgcaaagggtcgctggcaatagtacttttgcagtgtcgaaagggataaccccgacgacctgcaaacacttgggcaagggatgcagcataatttaagcctctccctaacaaggagtaagaaatattatgaaaaacttaaatgtttttgaaattttcaaatcttctcaatttgcttttatcaaaggcaatcgtcctaccgatgaaaaagcgattaaggcaaaaaaggattctcttgccgaatatgggatgttgtgtcccattacggcggtgaacggtaaagccatcatagcatcgggcggtcacctgaccgatttggacggcaacgatattgccgatgaacatgcaaaggattattacgctgttttggacggtcagcaccgtctgaaagcctaccttgaattaggcttgccgcttgaagatttggtggtcattgagccgctgaataaaggggttgccattgcattgctcattgccgaaatgaacatttgcacgaaaacgtggaaaggttccgactacatggcagcccccgcaatggccattaaggaaacaaatgcggcctttgattttgctatggaattgcaacgacgcaatttcccgctttcgacaatctcgttttgggcgtgtggcaacaacaaactcaaagccaaagatttggtggcaagtcttaaaacccgtgaaatgccccaatgtctgcaagaggctgacgggtggtgtgccaagagccgcaaatggtttgaagcggcaagtgaaaaattcacggctaaattcctcgccaaaaagtatttgattacattcatccaagacggttataatgctgccgatgacgcatccgcctacacttctgaaatggaagaaaaattaaagaatcttacccaatggcaggcggataaaatccaaaatgcccgcaaaacctctacgcagacacaagaacagataatccttgatctgttacgggaacatctttaattgttcggtcgtttaaccgaaccgaaaaggggacgattgccattacagcaatcgccctcttttttcattccgttatcgggatctcgtattcttcgacgggcatggccttgaaaaattcgtcgaacgtgtagcgcaaattcattggctgggctgaatagggattatccttgtcggttcgtaaggacggaacgataatttgtttccgttccatgtcgcctttgaacgtatcgggcaaaaggtaggttccgccgtttcggtgctttttaatcagcacgtaacgtgtcatgccgttcttaaagattatttccaaaatgccacgcatggcagagagggaatgatagacggctttttgcaatttttccttgtataaggccgactgctccattttgctaaaatctttctgctccacattccgttttatttcggcatcgttttcggctatctgtccgttcagttcggaaatttcctgctcggtttgcttgatttgtttgcaaagcacgttataatcggtttccaattcattgataaggtcatcattattcagtttcttgattttggcaatcaacgatgccgattgcgttttcagttcatcgacgctattgacttttcgggtgattgtttcccgaatctgcttgtttatcccctgcaattcatttgcccgctgggtattgaagcgcttgtattcctcggtgtgcaaggtttcctttacacaagtccaaacggacgataggatataagcgcatttgacgccgtaattttcgcatttctgtttgtcgttataagcacttgaacaacgatagattagatagctgttgtggttgggtttcatgtaaagaccgcatccacacgggcaaaacagcaaacctttcagcggattatagtatttcggagcattgctttgaaacaggctgttttcacgcatctgtttgttggccttgtcgaaatcttcgggcgtgatgatttgcagttcgggaatttggccgtacaattttccccgtcggtatatctcccctttgtatttgggattgcggataatgcggcagatgcccgaataagagagtttgtaagggtataatttattgtaaacccttacagtctgccgtatcgtattgccgtcgattagctgctgaaaaaggtattttaccgcttcggcttctttggcatcgacgacaagcaggtttttaggcgtttggttcagtttgtaatcgggattgtgaatgactttgtagccgaaaggaaccgtaccgcctgcaaacatattgctaaactcggccagtttggagcgtaaacccgtctgcatccgacctgcaatcttgtagcgttcgtcggcacttgctttggcttctactgacagcgtaatgatgtcgtaaagggataaaatagttccagccttataaatgcggtcttgcttatccaaaaacagaatatcgacaccttgtttcaaaagttcgtttatcgttgaaagaacggataaaatatcatcttcacgcgataaacgggagagttccgacacgataatcatatcggcgaccgcatcgtccacatctaaaagttcatttagacttttcctgtcctttctggctcccgaaattttctcttgaatgattttgattagatgataatttcggtcgctacaataggccgtaataagttcaatttgacgggtaatgtcttgtgcctccgtcgaaacacgggcgtaaccgactactcttttcgatttttccataacgctgtcaatcaatctttagcgcaaatttaacgtttttttgttaatctgcgacaaaattgattactatatgtacaaagatgcgatggaggccaattcgcccgtcgtgcgggagaactgttgggagtggtacacctcggtcgtgaagacccgtatgcacaacttctccggcgagttgatcgtcttcacgcgctggcacgaggaggatttgatcggcacgctctgccgccgggagcctttcgtcgagttcaccgactgggcgcagctcgatacgctgccgcccgatacctggctctatttgaacttcgaagctctcaaaacgcgtcctccgtcgccggtcgatccccgtgaaccgggcgaagcgctctgggaggagcttcacggcgcggaattgctgcgtggtaagcggcggctcgatcccgtgcggttcgagtgtatgtatcaggggcgtccttcggtgcgcgaagggctgctctacggggataatttcctgacttacgaggagctgccccgcgacatcgtgcgccgggcgaactataccgatacggccgatacgggcgacgattacctctgttcgctctgttatgtcgtcgatccggacggggtgatctacgttaccgatgcggtttattcgcgcgaaccgatggagatgaccgaaggactggtgggaacgatgctccgcgagtcgggtacgcgtgcggcactgatcgagagtaacaacggaggccggggatttgcccgcgcggtgcaggctttagcgccgcaggttcgtgtggagtggtttcaccagtccgctaacaaggaagcccgcatcctctcgaacgcagcgacggtggttcatacggtacgttttccctgcgactgggcgctgcgctggcccgaattgtatgcccatctgaccacttaccgctggaaattccgtgctaaccgctggcacgatgccgcagatgtggtgacgggcctcgtcgaacgtgaaatcgccgggcgggacacccgtattaaaagcgttaaatttatgtaggcgatagatcgcggttcgtgtgtattcgcgattgaggcttgcggttgcgactattgccggcagatactggagttgaaggatttcctggtgaagcagtcgcaatgggtgatcggcggcgacggttgggcttacgacatcggtttcggcggtttggatcacgtgctggcttcggggctggatgtgaatgttctggtgctcgatacggaggtttattccaacacgggcggtcagtcgtccaaggcgactccggtgggtgccgtcgccaaattcgcgtcggcaggtaagcgcatccgcaagaaggatctgggtgcgattgcgatgacgtatggctacgtgtatgtggctcaagtgtcgatcggtgcttcgcaggcccaactttttaatgtcctcaaagaggcggaagcctatcccggtccgtcgctcgtaatcgcttatgcgccgtgtatcaatcacggtatcaagggcggtatgacccggacacagacggtcggcaagcaggcagtagagtgcggttactggcatctgtggcattataatccgcagttggaggagcagggcaagaatccgttcgtactcgattcgaaagaacccgattgggcgaagttccgcgatttcttgctcaaggaggtccgttatacgtcgctcaaggccgtttctccggaggatgccgaagcgcttttccaggcagctgaacagaatgcccggtggcggtatgaagggtatgttcgtcggagcaagatcgaatactaaacgaataatattccgtagtataaagggcagcctcgatcggggctgccctttgtcgtgcttgttgcaccggttctaatcttcctcttcgagttggaagatcgcttcgaccggttgccggaaggtacgtgcgatcttgagtgcgagcagggtcgaggggatgaacttgctgctttcgatggcattgatcgtttggcggctgacgccgacctgttcggccaattgttgctgggtgaggcggacgacggcccgttggacacggatgttattcttcatggtgcaggttgcggttcagtctgtaaagattgaagtgatagacgagcaggaagatgaccagcggagtggccatgccgcaggccattaccgtaaggtagttgatgttgtagatcgacagagacacgacgatcaggagcaggtagttgatccacatggcagccatcagagcgttgagccggatgtgctgaatcatttcgtcttcgattttttcgcgcgagaagccgatgaaaagggcgccgacgaccgtgccgatgatggcgatgttgttcattaccgtttcgcggaaaagccagcggtcgaaattttcgccgaagaagcagatcgagcagccgagcagaaatgcgggaacgaagatcgcccagccgattttcttaaaaccgttgggcagtaaaagagttgttttcatagtcgtcctaatttttaggtgattattattgacaagacaaatgtaaagtatattttacaataatgcaagtatagtttacatttattctcttttatgaaatgggggatgatgttggaggatgtgcgaacgacaactgacagaggaggtatagttagtgcttgctattagtcgaaagctcattgcagaatagtttaaaaaacaattcaaaccattgagccagaccgtatatcgactaattctgctgtaaagggaagggggagagttgctaattttacccgcaaagcaaaaaattttctttggataagcgattcttgcagatatttattatttttacacttggatcgggtgtatcatccctttccaagacatattagaaataaagaagcgttatgcttatctcaaagtcgggaacgtaggaaattcaagactattcagagagaaaggcgtaatggttctcacgcatatagcgtgggctgctattaccatatctctgaataaaggttattcctacgacctccgacttagaacgtggcattgcagttccacgcttctttgttggttagattacgataaaatatcagacaattaattgttaaataataatacaacagattatgaggaaacttattgtatcgttcgcatttatggtaattgctttgacatcatatgctcaaagtagttcggagcatcttacttttaaaggtattcccattgagggaagtatgagtgaattttgtcaaaagttaaaagcaaaaggatttacatctattggcagtgaaaacaatcttgcattgtttataggtgattttaccggtcgtaatgcgactataggcgtaaccgctacagacgatggaaagaatgtctttgcggtagttgttttctttgaccccagtggtgagtggaatacccttgttaatacctacgactattataaggatctatacactcataaatatggtagccctacaatctcaaaagaaaagaaccctgcccgctctgactccaatgccgctttaatggcagaagttcatcaaggaacagttgtgtggggctgtgtatgggacataacaggtggagatatagaattgtcaataaaaaagacttctggcttttatgagggaatggtagtaattcgttatcgtgattctcaaaatgtagaaaccaaaatccaaaaagatttagaggatatttaacattcaataaaaggctcaattttatagctgagaaataaaatccgttaattgtcaaataataaataacagattatgaaaaagctttttgtgttacttgcttttatggttatcgctgccacatcgtatgctcaagtgtataagatgtataagactcagaactaccataatcaacttcgtttaaatacgatgacaggtgaagttcaacaaattcaagatgatggtcagtcttgggaagtttgtagtgcaagagaagttttaggagatagagaaggacgatttcacctttatgaaactcagaatatgtggactttcataatgcttgatacatatacaggtaagaattggcaagttcaatttagtgtcaagggtgaagactatatgtttgctgcacctatcaatatgttttctcttgcatatcctgaaaaatattcagattggactaatagatttcagatgtttgctactcaaaatatgtggacatttatattgttggactcatataatgggcgactatggcaagtccaatatagcacacaagatttagataatttattttgtattcctatcaatgaatatgaattagtcgcaaataacgaaaggtgcatattctcaattcagccattaacaagtatgtatcagtattatcttgtaaatgatgacactggtgatatgtggaaatttcaatggagtaccaaaggggatgattataggtggattgaacgttttatgtaaatagtgatgttagccctatatattaaattttgattaagcatcaatttcttaatcgtaataaaaaaatgctgcgaaattcgcagcattttttatctgtatagcggttcttttactcgctcaacggagtaacgcttacatacgatttgccttcgcgttttttgcagaaggaaaccgtgccgtcaaccagtgcgaagagcgtgtgatccttgccgatacctacgttctcgcccggattgtggacagtacctctctggcgaacgatgatgttgccagctttagcgaactgaccaccgaaaagtttgatgccgagtcgcttgctttccgactcgcggccgttctttgaactacctacaccttttttgtgtgccatgtttctctaaatttaaggttatgcgacaatttcttccacgagaatctggctcaggaactgacggtgtccgttctgcttctgatagcctgttctgcgtttcttcttgaacacgaggactttatcgtccttcaggtgcttaagaatcttacatttcaccgaggcgccttctactacaggtgcacctaccttgacctgaccgtcgttgtctgcgagcaggaccttgtcgaaactcaccgacgaattttcttcgccgggaagacggtggacatagagtttccgacctttttcagctttgaattgctgacctgcaatctctactataacgtacattgattaaattgtatgtgtttatacataaatttcaacgtgcaaatataaggataattattgaataaacaagggcaggcaattttttcttgcagacatttgttttggcacgtttttcggtgtatctttgatcgtgtaaacagtatgtatatcaaatgtatcgtatcttaatcgtgtcggaggacttcgtcttgcgcaaggccgtggctttttccttgaatgacctggatgcgtgtgtggagtgcgcggatacggtcagtgcgatgcttgtgcttcaccgggagtcgcctttcgacctggtgatcgttatgggtactgctgccgaaatgtgccggcaggaagtgatggacacgctgcgggcggataaaacccggcgtacgcgggtcttcgtgatttcgtggccgcaatccgaacagatggtacggagtatgtaccggatgggcgtgaaccaatacatgaccttgccggtgagcctgcaccggttgcggcggaaagtcatcaacgagctaatcgatcgggaaaaatggaaatgacgttttggtggtgcatcggggtcgttttggtttcaggagctgttttggccggaagctggtgcgtgcaacggtttgcaggtcgtttttgcctcaggcgggatgccgagcgccgcgaaaagtatttgaacagcgtgttgtggatgctcttctccggaaccgaagagtgcgctcactgtcccgaggcgatgtcttcgcgggataggcgccttatcgccgaggatattgccgacctggtggattctacgtacgggctcgatccggcgccgttgcgtcggatcgtcgagcgtcagaggcttgatgttttcctgctgcgtcgtattcgccgcaatggaggttaccgcagggcttattacctgcatctgctttcccgaatgcccgtcgatgaaaaaacagttcgggcagtggaacgttatacgcatagcaggaaccgttatgtccgcttctgtgcgttgagcgtgcagatgatggccgatatgtcggcgctttcctcgaaaatcgacgcctattcccatcggctttcgtatttcgaactgtccgaggtgctccgtatgttgcgccagaatgtgcagcctgtcgattacgaaccgttgatcctgtcgccgaaccggaatctgcggatgctgggactcagtgtcgtttggcgtttcggaatcgaagatgcggaggagatcctgctgcggatcgttgccgaaaaccggtccgaggagtccgtcggtgcgatgtacgttctttgtacgctgcacagtgtgattacgcgtcccgaagtggaaaaattcgtgggcggaatgaatcccgttcagcgcagggtactgctgcgttatattgcccggcagggatactccgcgaacgctttgcaggtattcattcctgaagaggagaagcgatattatgtgtcgttggtcgattcgtataaattgaatgtcggatagtatgtggttcattgagttaggtacgatttgcgtgacggttgccgtcgtggtgcgtgtctggtggctggtagttcaagtgttgagggcgcgtaacaagcgtcgtttgctgtcccgtatgttcggcgtggtttccgattcgcccgattttatcggaatttcggcgatttgccacgacatagattccgtttcccaggtggccgacctgctcgatgtggagtatgccagttacgaattgctggtggtgatggacgcccgtctgaaaccggagttgtttcatgagatgctccggcattaccggatgatgcgggtggattatcatccgttcgaagcctgttctcagttgggtgtacggggattctaccgctctcagacgcggggtgtcaatcgtctgacgctgctcgatcagatggaggcgttttccgccgtttcgtcggatgcggccgtgcgagccgcgtcgtacgattatattttgccgatcggccgcaacctgcgcctcaaacggggtgcgatcgaccttctggcgatggagttggcggttcatccgatccactctatatcgttcgtgcggactgccgtaggaccttcgctgcgactttatgcccgggagtatgtcggccggttgggtcgtttcgaccgggccgacgggtatgaattgtcccgcaaggagaggatcacgttgtacgaaccgttgttttatgagttgcgcccgtcccgctatgtctggattttgactttgaccggaatggcgcttttggccggatgtgcgattgcggcgtggtcgttcgggtggctgccgatgactttgttgctgctcgatattctgttgctttggggactgtttctgtggctcggggctgtttcggcaccttttcccgccgggaagcggaatgctgcgctcggggccgtgtaacggctgccgggtttttattgccggaaattttacggatccgggaattatatagtacctttatcctgtcttaccgatcaaaaatatcattatgcttgacaacgagctcaaatcataccttttgcccaaccttttcaatgcggcggtgcgggccggtgcggccattatgcaggtttacaaaaacaaggaggattacgacatcagcattaagagcgacaagactccgattaccgtcgcggaccgccgggcgcacgaaacgatcaagacctatctgggacctacccgtattccgattctgagcgaagaggggcgtgagatgcggtacgaagagcgctgcaactgggagctgttctggttggtggacccgctggacggaacggtggagtttatcaagggaaacaacgagtttacggtcaatatcgccctgatggagaataaccggagcgtggcgtcggtggtgtatgttccctatttgggcaagatgtatctcgcgtggcgcgggggcggtgctttcctgaaagagggggtggcggccgattccgacgcggaatactcgtacgggcagatcgtcgaaagtatgcggcgcctgcctgtagagtcggcgcggcatgaacatccccgggtcgccgtgtcccggtcgcacaagtcgcccgaactcgcggagtatatcgaggaattgcgaaagagccatcccgatctggaggtcgtggagcagggcagctcctataagttttgtttgctggcggaaggcgcggtggattactattttcggactacttccacgtatgaatgggatactgcggcgggggagttgattctctccgaagcggggggcgaaacgctttcgctgccggattatcgtccgttgcgttacaacaagacggatctggttaattcttggtttttctgtcgcgcccgtaaaatgccgggttgcaggtcggaggcggagatgatggtcggggagtgttctgcggcggactgaccgcctctcggcatcgtggggttgaaaccgagaaaatagaaacacgggtaatctgaattcagattgcccgtgttttcggtttgcggagaatttgtcgccgattatttttttgcggagccgtgtactgcggctgccgcttcgggggtgcaggcggcgcagttgcccgagcatccgggctccgatgcgcaatcttcgagtcccgtcatctgttcgcgggtctcctgaacggcgcatttgatacccagtttgcgcatgttttcgttggtggaaatttcggagtcgatgtggtgtcccttgaaaatcagggtgagcgacatggccaggacgaaaagtccgacggccagaatcgccaaaagaattatgattaaccaggttggcatggtaactgaaatttaatagtggaaatttgggtgttccgatgcaaatttatacatttgtgttattaattgcaaaaatgctgcccggaatgatccgggcgtatgctgacagagtaaatccggtatgaaaatcgttattgcgggtgcgggcgaaatgggaagccatctggcgaaaatgctcagcggcaacgggcacgacatcacggtcatagacagcgatccgaaactgctggccgacgtggccagcctggccgacgtgctgacggtcgagggcgactccacgacctttgccgtgttgcggaaggcttcggtgcgaaagtgcgacctgttcatcgccgtcaatcatgtcgagaacgacaacgtggtggcagcggtgctggccaagcagctcggggccaagaaatccatcgcccggatcgacaacaacgaatacctggagcccaataacaaggagatttttatcaacatgggtatcgactacctgttctatccggaaaaggtggcggctcaggaggtgatcaatctgttggggcacacttcgacgacggagtacgtcgatttctcgagcggacggctttcgctcgtggttttccgtcttgatccgacctcgtccctcatcggacgcgaactttcgggtttcaaggacgatgcggcgcagctcagctatcggacggtggcgatcgctcgcggcggtcagaccatcatcgcccggcaggatgaaatatttatggagggcgacatggtgtatgtcatcgcccggcaggatgccgtgaaggaggtgatggagttctcggggcattccaacgtggagatcaacaacatgatgatcctcggcggttcgcgcatcggcatacgcattgcgaccgaattgcaggacgaggtcaatatcaagttgatcgactacaatgccgagaaggcctatcggttggccgaattgttggacaagacgttgattatcaatgaagatggccgccatatcgaagcgatgctcgaggaggggctggccaatatggacgcttttatcgcggtgacggggcgcagcgaaaccaatattctggcggcgatgctcgccaaacgcatgggcgtcaagaaggtgatcgccgagatcgagaacctcgattatatcaatctggccgagagtatcggtatcgatacgatcatcaacaagaaactggttacggcgtcgaacatcttccgcttcacgatgtcaaccgacgtgcaggcgatcaagtgtctgacgggcagcgaggccgaggtgctggagttcatcgtcaagcccaacgccccggcgacgaaggctccgatcaaggagttgaagctgccgcaggatacgattatcggcggcgtggtgcgcggcgacaaggttttcatcgccgtgggaaacatggagttgagcgcctacgaccgcgtggtggttttcgccatgccggcgtcgatctccaaaataggatatttctttaattaacgataaggaggagcagcgcaggatgtcgattcggaacagtttgttacgtacctatttcgcccgccggatgaaggcgatagatcgttttcggcgacatccggaccaagtgcaggccgagatgttccgacagctcattgcgcggggggccgatacggagttcggtcgtcggcacggtgttgccaagcatcttacgcccgaggcgttcgccgcacgggtcggagtgcaggactacgagagtttcaagccttatatcgagcggatgctggccggagagaagaatgtcgctgccccggggcgggtgacgcttttcgcccgttcgtcgggaactacgtccgaccgcagcaaattcattcccgtcacgcgggagtccgtgtggtggaaccatacgctcggtatgcgggacgtggcggcggtgtatgcttcggccaagccgcagacgaagatcttcgacggcaagacgctgacgctcggcggttcgtatgtccgggagaacggagctctcatcggggatctgtcggctgtgctgatcagccagactccgttctggagcggttggttccgggcgccgaagatggagacggctctgattccggatttcgaccggaagatagaggggatctgccgggagtgtacccgagagaagatcacggcctttgccggcgtgccttcgtggaacctggtgctgatgcgccgggtgttggaatatacgggcaagagcaacctgctcgaagtgtggcccgatctggaattttttgcgcacgggggcgtggcgtttacgccctaccgcaagtcgttcgccaagctgatcccgtcggaggggatgacctatctggaaacttacaacgcttcggaggggtttttcgcgctggctgacgatctgacgcgggacgatatgctgctgatgctcgattacgggacttattacgaatttcgcagcggcgagcagatcgtgccgctcgaaggcgttcgggtcggagaggtttatgcgatgatcgtgacctcgatcaacggattgtggcgctatgagataggcgatacggtggaattcacctcgacgaatccctaccgcatccgtttcgcgggtcgcacgcgtcagttcatcaacgtcttcggcgaggagctgatcgtggataacgccgagcgggcgctcgcggcggcctgcgagcaaaccggtgcggtggtcgaagagtactccgtggcgccctgtttcatggggctgaatacccggggagcgcacgaatgggtgctggagttttcggagcggcccgatacgccggagcattttgccgaagtgctggaccgggagcttcgcagcgtcaattcggattacgacgccaagcggcagacggcgctcgatccgccccgcatccatgccgtgccgccgggaacgacgctgcgctggttgcagaagacgggcaagaacaagctgccccgtatgcgcaacgaccgtacggttgtggaacagttactgaagattgaacaataaataacgcgacgacacgcgtcgctttgccgggggccggggattgcggcgggaggcggttttctgccgtgccgccgcagacggtggacttgccgggcggcgggaccgggaaggggccccgcagtgcggcgtgaagtgcgtgacgtcgtcaaaacatccgatttatgtacattgcgatagccggaaatatcggcagcggcaaaaccacgctgaccgagatgctgaccgagcgctacggcgccaaggcctattacgagcagagcgacaatccctacatcggggatttctacaacgatatgaatcgttggtcgttcaatctgcaaatgtattttctgggcagccgcattcagcagacgatggatattctgcgcagcggtccggtcgatatttttcaggatcggacggtgtacgaggatgcctatattttcgccgacaacctgcatcgcatggggctgatgtcgggtcgggacttcgatacttatatgagtatcttcgggttgattaccaacctggtgccccggccggatctgttgatttacctcaaggccagcgtgccgacgctcatttcgcagatccgccgccggggtcgcgcctacgaaatgaacatcgacgaacagtacctgcggcggctcaactaccgttacgacgactggatcgaacatatctaccggggcgaagtgctcgtgatcgataaggatcgtgaggatttcgtcgcggatgctgcggtgatggagaagatctgcgctcgtctcgaccggaagcgggaggagctcgaaaccgctaaaaaatagtctcgatgttgccggaatctttcacgcggcgggttatggccgagctgggaccggaggaggggcgtgcgctgtgtgaggcgctcgaaggcccggcgccgacgtccgtccgcctgcatccgcagcgtccctgccgctggagcggagccgaggcggttccctggtcgccggcaggacgttacctgacggagcggccttcgtttacgctcgatccggctttccatgccggggcttattacgtgcaggaggcttcgtcgcagttcctggctcacgtgctggccggggaggaggtcgccggaaaacggattctggacctttgcgccgcgccggggggaaagacgacgctctatgcgtcgctcgcaggcagcgacgggctggtagtggcgaatgaagtcaatcgccagcgggcggctgttctggcggataacgtccgcaagtgggggctgggaaacgtggcggtgacggtgaacgagccggcacagatcgcggtgctcgaaggatggttcgacatcgtggcggtggatgccccctgttccggcgagggaatgttccgcaagacacccgaggcacgggacgagtggagcgagaacaatgtgaaaatatgtgccgtccggcaggcggagattctgcgcgaagcgtggaagacgctgcgtcccggcggattgctgatatacagcacctgcacgttcaaccgactggaaaacgaaggatcgctggagggattgctggccgaagcgggtgaagagatcgtcgaatcgaccgctttcgattgcccgccggagtggggtgtggtttgcggtcgggtcggtcctttccggacgttccgtttctatccgcaccggacccggggcgaggggttttttgcggcagtggcccgtaaggtgcccgatggcggaagccgtgtccgtgtgcccaagtcccgccgaacgattttcacgcccgccggacgcagggagtgtgcggaactggcccgttggatcgccgaacccgggcggatgcgctttgcggcggtggcggatgtctattatgcgtattacgaatcgcagtacgaggcggtgaaaatgctggccgaatcgctgcgcgtgatcgcctcgggtgttgcgatggggcagatcttcaaggagcggctcaagcccgatcatgcgctggcgatgttttgcggattgaaccgcagagcggtgcctgttgccgagttgtccgaagaggaggcgctgcggtttctgcgcaagcaggaggctgcggctgcggctttcgccgaggggatgaatctggtgacgcacgggggagcggccctgggtttcgccaagcggattcagaaccgggtaaacaatatgtatcccaactcgttgcggatattcaacctgtaattgtacatgttatggccaagaaactattctattcgatgggcgaggtagcggagatgttcgacgtcaatgcttcgctgatccgtttttgggagacgaaattcgatatcctgcgcccgcagaagaacaagaagggcaatcgcctcttttctccggccgatgtcgaaaacctgaaattgatctatcatctggtcaaggagcggggcatgaccctcgacggtgccgcccgttgtctgaaacagaataaaggaaccatttcgcgcgatgcggagctgctcgaacgtcttcagcgtgtccgggccctgctcgaagaggtgcgggccgaactcaaggagagtgcggaggaccgggcggttgtcgcggaaaacggggctggagaggcggccgaagtaccggcgcttccggttcgtacccagaagaagcctgccgcgcaggagtcggcggacgatgcaggaggggagggagcggagactaaaggacccgtgcaggtgatcgaaccaggtccccggagcgaaaagccggctccgaaacgctcggctgcgcgtcagccccggcgcaagaaggagaaagaggaggcggagagcaaggaactgttcgctttctacgaacagtcgttgttttagacggacgttttgaaatacggcaggcgggtacattttgccttcgcctccgattcggagggcgttgcggaccgctacggtgaccgaccccaccgggtatgcgaacgaacccgatacttcggtatatcttttggggcgcgtagcgccgcaagtcccttcgaggtggggatttcggggatgggcagcgttataaacgggaccacaggccgcgaacaagcggccgtcgaatatggtacattgaaaatataattgccttttcaaataatgtagtaggatcatgaaaatcaaggatattgccgaagtgatcgaacgatatgctccgctccgtttgcaggagtcgtatgacaatgccggtctcatcgtgggacggcccgaggacgaagtgcataaggcgctgctggccgtcgatgtgaccgaagaggtgctggatgaggcggaacagacggggtgcgatctgataatcacgcaccatccgatcgttttccatgccctcaagcggttcaattcggcctcttatgtggagcggtgcgtcgagcgggcgatccgccggggaatagcgctctacgcctgtcataccaacctggacagtgcgccgggcggcatgagctggcggctggcggagatgctcggcgtggaagagttgcgggtgctgcagccgaccgatcctgcggacgggcgggtcggcttcggggtggtgggcgaactgccgcagtccatgtcggtgcgggattttatgcaccgtatccaggagcgtctgtcggtacaggtgatccgccattccgagctggtcagggagcaggtgcggcgggtggccgtatgtaccggggcaggagcctcgctgctcggcgaagcgcgtcgtgcgcaggccgatgtgtatgtcacttcggaccttaaatacaatgatttcatgacccccgacggagccttcgtggtggccgatatcggccatttcgagagcgaatattgcgcaatcgatattttatttgatattttatcgaaaaatttatttacctttgcggttcgcaagagtgtaaattcacgtaatccgatcggttacatagttccgtctaaacaataaaaacacgatatggcaacacagaaaaagacagctgaagttgattattcgatgcaggagaaaatcctggccctctacgatctccagaagatcgacagccagatcgattcgatcaacaaggtgaagggtgagctgccgctcgaggtgcaggatctcgacgacgaattggccggtttgaaggcgcgtgtcgagaatatcaatgccgaaatcgaggagctcaacgccctctccaagcagcgcaagcgcgaggtggatcaggccaagatactcatcggcaattacaaggagcagcagaacaacgtccggaataaccgcgagttcgatgccattaccaaggagatcgagtatcaggagttggaaatcgaactggccgaaaagcgtctgaaagagtatgctgccggaatcaaggtcaaaaaggcgcaggtcgaagagaccgaggccctgatggcggaacgccggaaggatctcgaagccaaacaggccgagttgcaaagtatcgaggccgagacggcttcgcaggtggcggaatttacggaccaggcggccaaagcgcaggccaagatcgacgaacggctgctggaggcctatcagcgaatccgtcgcaacgtacgcaacggactcgcagtggtgacggtacgacgcgatgcgtgcggcggatgcttcaaccggatcccgccgcagcgccagatggagatccgtcagggcaagaagatcatcatttgcgaatactgcggtcgtattctggtggccgatcccgaagagcagcaatagcaagcgtttggggttgaacgatttgtagcccgaccttcccacggaaggtcgggctgtattcgttgagtcgaaacggggacggcctcttttccgaatgaggatttcgaaaccccgattgctttttttcgatacgatcgttgcgttcggatgaaacttttgccgcgaaatcgttgttttttccaaataataattaattttgcgatgatgtaactttttgaaatacccgatagatgaagatagctctggctcaattgaattatacggtcggcgacgtcgcaggaaatacaaacaagatcatcgaatccgtacgtcgtgcgaaagccgaaggcgcggacctcgtcgtttttgccgagcaggcgatcagcggtgctccttcgttcgatttgctgcggaaaaatccttttttggaacagtgcgaagatgcgttgatgcggattgctgccgaatgcgatacggtggatgcgatcgtggggcttccgattctcaccaaggaggggacgatcagtgccgcagcgttgattcaacaaggaagagtcgtccgctatgtgggaaaacagaatatcaccgtgcgccgcgaattgggatttctgaccccttcgaaaggttgcgaatacgttacgatacggggttgccgctgtgcgctggtcgtaggcgacgatctttttcataccccggatttcgacaagtcggtcgaaaccgtcatcaatatccatgcccgccgctaccgcaagggcgacttgagtcgtcggtacgacgtaatccggaatatcgcctacgtcaagggaaagaatgtggtgatggtcaatcaggtcggcggtgctacggagctggtttacgacgggatgtcgggcgtgatggacaactggggcaagctggtgcggctgctgaaaagtttcgaagaggactttcaggtgttcgataccgaaaatcccgcttgcagcgtcgagtccgtccctgtgtcggtgaacgaccgtacccgcttcatttacgaggcggcttgttgcggtctgcgggatttcttcgttaaaaacgggtataaaaaggcctgtgtcggcgtttcgggcggtatcgactccgccgtggtcgcttgtctggcggttgcagcgctgggggcggagaacgtgcggggattgatgatgccctcacagttttcgtcggaaggatcggtcgaggatgccaagcaactggccgaaaacctcggtatcgagttccatgtcgtgccgatcacggaggcttaccgcagtatcgtcgatacgttgatcccggtgatcggcggtacggatttcgatgcgacggaggagaatatccagtcccgcatccgcacgttgatgcttatggccctgcagaacaagaacggctatgtcctgctcaactgttccaacaagagcgagaatgcgctcggtatctgtacgctctacggcgataccggcggcgctttcagcgtgacgggcgatctgtataagaccgagatgtacgacttggcccgctatatcaaccggaaattcggtgcacccattcctgaaaacatcctgaccaaagagccttcttcggagcttcggcccaaccagaaggacagcgacatgctgccctcttacgaggtggtggatgccatcctgtaccgtctgatcgaagacggacagtcgcgtgaagagatcatcaatgccggattcgacagcgacgaggtacagaaaatctatgcgatggtcatgcgtaacgaaaagaagcgttttcagtatccgccggtgcttcgactctcgtcctcctcgttcgggcatgagtaccgtatgccattgacccataaatatgtaaagtgacccgatggaccgtatcgaacatagcggggtggtgaagcgcgtcgatgcggagagggtttgtgtggaaattacggctcatggcgcctgcgggggctgcaaggcccgcgaagcctgcggtttgggtgagaccgggcagaaaatcgtggagatacgtactccggctgcggcgacgtatcgtcccggcgacagggtgacggtcgctataacccgacgaacgggagcggtcgcggttttgttggcttatgtcgtgcctttcgtcgtcctgatcggcgtggtggcagtatgctatctgctcggcgcgggcgatggggcggcggtacttgcaggattgggatctgtcgtcctgtactatgggattctctggcttctgcgccggaagatcgataatgcgattcatttcacaatatccgaataatatggaggtattactttacacagtgcttacactttgcgtgttgggaatccttgccgcgctgatcctctatttcgtggcacaaaagttcaaggtcgaggaagatccccggatcgacgaggtcgaaaagatgctgcccggtgcgaactgcggcggctgcggattcgccggatgtcgcggtttgtccgatgcgttggtgaagcggaccgacatctcttcgctcttctgcccggtgggcggggccgaagtgatgaagaccgtcgctgcctacctgggcaaggctgctccggagaaggagccccaggtggctaccgtccgctgcggcggcagttgcgagaaacgtccccggatcaatgcgtacgacggtgttacgtcctgcgcggtggctgcttcgctttatggcggagaaacggggtgtacgtacggctgcctgggatacggggattgtgtgacggtttgtaacttcgatgccatagcgataaatcccgaaacgaggcttccagaggtcgatttcgacaaatgtacggcctgcggcgcgtgtgtcaaggcttgtcccaagtcgattatcgagttgcggaagaagtggcccaagcagcgggcggtttacgtcgcgtgcgtgtcgaaagacaaaggggcggtggtgatgaaagcctgcaaagccggctgtatcggctgcggaaagtgtgagaaagtgtgtccgttcggagccattacgatccagaacaacctggctttcatcgactcctggaaatgcaagctctgccgcaagtgcgtgaacgaatgccccaccggtgccatccgtctggtcggtatggagccgctgcccaaggagcctaaagccgctcctgcatcgaagcaaacgtcggcagcgggagagaagccggcttcggaggagaagaagactgaaaaaaccgaatcctgatccgaacgataaaaccgaaaacaaacgctatgaagacatttccgagaggcggagtacatccgtcggataacaagttgagtcgggcggaggccgtcgaggtactggcgttgcccgatgtggtgaatgttcctttgtcgcagcatatcggtgcgccggcggttgcgaaggtggccaagggcgacaaggtgaaggtgggagagttgatcgccgaagccgccggtttcgtgtcggccaatatccatgcgcccgtgtcgggcaccgtgacgggggtggatatgctgcccaacgggcagggaatccgccagatgatgattacgatccgtcgcgagggggatgaatgggccgaagggatcgacacttcgaaggagctcgtgcgcgaatgtacgctttcggctccggagattcttgccaggatcaaggaggcgggtatcgtcggtatgggcggtgcggcgttccccacgcaggtcaaactgacggtgcctgccgggaaaaaggtcgagcacttgattatcaatggtgtcgagtgcgaaccttacctgacgtccgaccatcgggtgatgctcgaacggagtgaagagctgctcgtgggcgtcacgatcctgatgcgggcgctcggcgtgagcggcgcttcgatcggaatcgagaacaacaaaccggatgcgatcgcccgattgagccggctggctccgtcgtaccccggaatccgggtcgttccgcttcgggtccgttatccgcaggggggcgaaaaacagttgatcgcggccgttacgggtcgggaggttccgccgccgccgggactgccgatcgacgtgggggccgtcgtctgcaatgtttcgacgacggtggccgtgtacgatgcggtgcagaagaacaaacctttgatcgagcgggtggtgactgttacgggccgccagatggaggctccgaaaaatctgctcgtccgtttcggaacgccggtggctgtcctgttggaggctgcgggaggcgtgccggccggggatgtgaaagtgctcaacggcgggccgatgatgggacgggcgatgagcaacctcgcctcaccggtggtcaaaggctgttcgggtattacggtgctcgggggggcggcagccctgcgtggtcgggagagctcctgtatcaaatgcgccaaatgcgtgtcggcctgcccgatgggattggagccttatctgatggccaaactctcgcgccgcaagctgtgggagcggctcgaagcggagtgggtgaccaactgcatcgagtgcggctgctgtcagtttacctgtccggcggatattccgctgctggactttatccgaatgggaaaacaggaggtcggggcgttgatccgtgcccgcgccgccgcccatgcaaccaagaaataagaaaaaagagatagcgtatggcaaataaattgatcgtagcacccgctccgcacgtgcatggttcggaatcgacgcaaaagatcatgcgggacgttctgctggcgctgacgcccgcgctggtgttttcggtggtggcgttcggctggagcgccctggcggtgacctgtatttcggtggccagttgcgtgctgttcgaatacctgattcagaaatttctgcttaaggggccttgtacggtgagcgacctgtcggccgtggtgaccggcgtcctgctggctttcaacctgccggcgtcgctgccctggtggatcgtcgtgatcggcgctttcgtgtcgatcgccattgccaagatgactttcggggggctgggcaagaatccgttcaatccggcgttggtgggtcgtgtgttcctgttgttcgcctacccggtgcagatgacgacttttccccgtccggtcggacagttggccgacgctttttcgggagcgacgccgctggcagccgtcaaagcggagctggtgtcgcatacgtcggtcaattatcaggatgtccttttcggttcgatccccggttcgctgggtgaggtctcggccctgctgttgctggtgggagccgtctatctgctgtggagaaaagtcattacgtggcatattccggtggcggtcctgggaacgatggccgtgttcgtctttctggtcggcctcggacagggtatgcacggtgaagcgttgtgggagttcccgctgttccatctgcttgcaggcggagccattctgggtgccgtttacatggctaccgactattcgacttcgccgatgacgcataccggtatgctgatttacggagttggcatcggcatcattacggtactgatccgtttgtggggcgcctatcccgagggtatgtcatttgcgatcctgatcatgaattcggtcgtgcccctgatcaacaaatatgtcaaaccccggcgtttcgggttaaaataggaggagcggaggatgaagagtacattattcaatatggttatggtgctgttcgtgatcacactgctcgcttccgcaggcgtgggagcggtccatatgattaccgaggagccgattgccgaggcacgggtcaaggcgacccgcgaggcgctcaaacaggtgctgcccgagttcgacgaaacggaagtgttgcgcgatacgatcgagaacttgccggtgacggtccatacggcttccgagaaaggccgtgtggtgggttatgccgtagaatcgatgactaaaaacgggttcagtggggtgatccggctgatggtcggttttgcccccgatggtcagatcctcaatatccgggtgctcgaacaggcggaaactccggggctgggtaccaagatggtcgatgcgggcaatccgctggaaaagagttttgtcggccggaatccggcccaaatgaaattgggcgtgaagaaggacggcggcgacgtggatgccctgacggcggcgacgatttcgtcgcgggcttatgtcgatgccgtgagtcgggcttataaggcctattgcgaaaaggcaggcgtcgaagctgccgtgaacaccgtttcgggtgcttcgaatactcaaaatgcgggagcggacggtacttcgggggcttcggctacccgagatgcgggagcggatggtgcgtccggtgcttcgaacaatcaagaaacgggaacggaagccgcgacgggcgcgacggctgctcggccgaatgcagaggctgggacgcgagctgcgggtgaagagcggtaccgagagcggggattggagcgtgaaggccgttccaaccgcctccagcgaggaagtcagaccgtgaacaatgcacaggaaggaggtcaaaatgaataatttgaaagtacttgcgagcggcattatcaagaataatccgacgttcgttctggtactcggcatgtgtcccacgctgggtacgacgacttcggcggagaacggtttcggtatgggcgtggcgacgatggccgtgctgattctgtcgaacctggtcatctcactgattaagaacctgattccggacaaggtgcgcatcccggcttttatcgtggtgatcgcatcgttcgtgaccattatctctatgctgatgcaggcgtatgtcccggcgttgtatgccagtctgggcgtattcattccgctgatcgtggtgaactgcatcatcctgggacgtgcggaggcattcgcctcgaagaacggaccggtggcttcgatcttcgacggtatcgggatcggtctgggcttcacgctgtccctgacgttggtgggggctgtccgcgaagtgttgggcagcggggccatcttcggttattcgttcggtgttacggactacatgccgttggtgttcgtgctggctccgggtgcttttatcgtactggggtatctgatggcattgtttaataaatttctcaagaaataggtatggagctctcttattttgccattatcgtcggcgcgatcttcgtcaataacgtcgtgctggctcaattcctcggcatctgcccgttcctgggcgtgtcgtcgaaagtcgaaacttcgctcggtatgggagctgccgtgaccttcgtcatggcccttacttcggtggttgcatggtctattcagacttacgtattggtgccgctggggatcgaatacatgcagacgatcgtctttattctggtgatcgcggctctggtgcagatggtggaaatcatgttgaagaaggtgtctccgtcgctctatcaggcgcttggaattttcctgccgctcattacgacgaactgtgccgtgctgggcgtggcgattctgatgatctccaaggagttcaacctgttgcagagcatcgtttattccgtggcgacggccatcggcttcgcattggcgctggtgctgttcgccggtattcgcgagcggctcgaactggaggatgtccccaaggccgtgcagggggttcccgtggcgctgattacggccggtattctggcaatggccttcatgggtttctccgggctggtataacggttattggtacgaaaagggatttatgaaagagctattatttctatttaagggatttgccccgttgattatcaggctattttatcggagggggacttctatcgttcttgtcaaatccgtccgtctaaactgaaatgatatttgtggcaggttaatttgctgctatatggggcatacattggatttgatgtccggattaaatccaaaattacttttcctcacgatttatttggagtttttatttcggagagggcggttatcggtgaaaattgcgtgatttttcaacaggtgacgatcggatcgaatacattgccggatagtcagagaccgggagcccccgtcatcggagataatgtatatatcggagccggtgtgaagataatcggaggggtaaaggttgggaataatgtccgcattggcgccaatgccgtaatttttacggatgtgccggacaactgtgtggctgtcgttaatggagtgcgcacaatccataagtcggaaccattggacaaccggtttatgccgatttcgaagttaaaggaatcggaatagtgcttcggaggatatattttacttccatttagcatcttgctgaatggggatgggtaaaataaaggctttaaaaatcaggagtataggtttttttgctcctgattttttgcatgttgcgtttctcggcttttcagccaaaaaaaggttgaggcagaagttgaaagtcatgtcggaaattttgtctgttcccgccagtaggaacaactttgcgaaaaaagatcgtatcgattactcctgcggtggggcagcctgtttttggtgttgtgtaatctgtcccgaagacgccgatctggcttttatccctgccgaggttcggttggcgatcacgatcaagagcatgatgatggatacgatcatcaggatttcctggacggaacaacatttgatcctgcggatgagttttgcaagcatagaatttttcttccggattgtgtaactttgtggctcaaattatttacttttgtaaaaataacaataaaatccgtatcccgatgaaagaaaacgtcataaaattgcatgataaaaaattcaaggtgatgattccggctgcaaagatagaagaagccgtggctgcggtagcggcgaagatcaacgaggattaccgggagaaacggaatccgctgtttctgggggtgctcaacggctcgtttatgttcatgagcgacctgctgaagaagatcgatttcaactgcgaaatatcgttcgtgaaactctcttcgtactgcggtacctcctcgtcgggggatgtcaagtgtctgataggactgggcaacaacatcgaaggccgggacgtgattatcgtcgaggacattgtggatacgggcgccagcatcgaacacatggtcgaggagttgaagacgaagaagcccgccagtatccgcgtgtgtacgcttttcttcaaaccgaaagcataccagcgccagattccgatcgattatccggccatgcacatcggcaacgagtttatcgtgggatacgggctggactacgaccagttgggccggaattacaaggatgtttacgtggtgaccgaatagtccgatgaaggaagcgacgaattacgacttgttggacggagggcggaaattgcctctggtggaggatttctatacgattcaaggcgaaggattccatacgggcaaaccggcctatttcatccgcctgggcggatgcgacgtaggctgccgctggtgcgatgccaaatatacgtggaatccgaaactctatcctccgaccgatatttcggaggtggtgcggcgagcgacttcgtgccaggcgcaggctatcgtcatcacgggcggagagccgttgctttacccgttggggcctttgacttcggcgctcaaggggcacggactcaagatatttctcgaaacttcggggtcgcaccctttcagcgggtatttcgactgggtttgcctttcgcccaagcgtcagcagccgcctctgccggaggcgttctggcgggcgcacgagctgaaggtcatcgtcgagcgggaggccgatttgcaatgggccgagcggaacgccgaacaggtcggacgggagtgcaagctcttcctgcagcccgaatggagcgtgtcggaggagatcatgcccctgctggtcgagtacgtcaaggcgcatcctgcgtggaatatttcgatccagacgcataaatacatgcatattccttaaaggattcggaagatgcagttgaaattggacaagcggttttgggtggtgattacttgtatcatcgtggttttcacgattttcatcgtgggacgaaatctgctgcacgccatagagatcagaaaagatatcgctatcctggagcaggaaagggcgatctatcgcgctcggatcgagcaggacagtacgctgctcgaagagctcaagtacgacgataatctggagcaattcgcccgcgagcgctatcgcatgcagcggcggggggagaaagtctatatcgtggaatgaagcggctttcgatgcgtgtggatagagtttttggagatacggcgatgtgttataaagcgcactgctgcgtcattatcgggatgcgggctaaatctttacggcagtaaattcctgtcgcccttaccctcaatgccttgcatccattctgacatcccttagaggttgtgtctgaaattttcatttcgacacagcccctttattttttgcggcggaccgtgccgatgtcgtacggcagaagtcggcttcgttttggagagagcttgcggtgaatcgccgggatttcgagcgcttgcagcgggaatattgcggcgggcgatgcggaccggatttgcaacggctcctttctgcggagaagcagaaggtatgaggagcggtatggaggatgaccttcggatatttcggaggacggtatgtgccgggttgttgcaaccttttcggaacgccggtcaatagtggcggaatccctgccaatcgaccggcagaggggtgccgtttcggagccattcgagatgattgccgcccgtgatgcggccgatgaagtggaactcatcgccgaaacggagccggtagttggacagaagtgtgttggcgctctccggagcgacggtgaagagaagtttgtagtcttcgccgccggatacggcggtttcgagatcgacgggagtcgggatgcactcggtatcgacttcggcacctacgccggaccggtgcaggatatgccgcaggtcggaggcgatgccgtccgagatgtccatcatggcgtgcacttccggacgttcgccgagccagatgccttcggcgacttgcggggcggggttgcggtggatctgtgccagcggggtgtcgtaccgtccggccaggatatcgcgcagtccggcgcccgactctcccagcgaaccgccgacggcgatcaagtcgccggggcgtgcgtcgctgcgccgtttgatatggctgtcggcgatgcgcccgatggccgttacattgacgaccagtcccgaatccgaggctgtggtgtcgcccccgaccaggccgacgtcgtattgggccgagaggtcgcggtagccttccatgaaatcttcgatccatccttcgggcaggtcgtgcgggatagccagcgagagcagggttgcgatcgggcgggcgcccatcgccgcgacatcgctcagattgacggccagggatttacggcccaattcacgcgccgaggtcgcccggcgcaggaagtggatgttttcggccagcaggtcggcggtgaagaccagcgattcgccgctgcccagcgggaagaccgtgcagtcgtccccgatgccgtcgaatccgttgcggggaattgcggcgaacatgtcgcggatcgtgtcgataagtccgaattcagtcatgtcgaatggcggtttgtgcggagcggcggcgttcgggtaaattgaacggacgcggccgaagtccggaatgtagcaaagatacgaataagccgagcgcaaaagcaaattttatttgtattttgccgaggcgcgtcttatcttctacaaagatagcgaaagccgagagcaattatgagaacttgttcttgaaaattgccgaaccgcatcctgtcttctgcaaagatagccaaagccgggaggatacgaaaatttattttcggcgcccgggtcgtcccgactttcggacgggtgtgaaatgtgtgtgaattcgatgcgaatcggaggatcttgcggcgtatatccgggtttttcactatttttgtaagcaggaatgacgaaggcgtgcccttcgtgccgtttgtctggctggggatagtcggagcgctgcctgtgctgtggatgttttcgggattttcggctcgtcgaagtgtccgttttcggattacgacggaagatattcggaacgatgcgagttctgtctgtcgggtgctcgtgcgtaaaggattggtgcgcgatcgaatggcggaaaagcttcggatagaggcggattccggattccaggtgtaattttgatttgaaacgatataatttaacaagaagctgtatgtggggagagaagaaaaccaagatcgtagccacgttgtcggatttccgcgccaacgaagaatttgtacgcggccttttcgaggccggaatggacgtagtacgcatcaattcggcgcatgtgaccgaagagggggccgcgaagatcgtcgaggcggtgcgccgggtcaatccggcgattccggtcattctggataccaaaggacctgaaatccgtgtgacggccgtggccgacgagtacggcggtgcgatcggctttcagaccggggagcgcgtgaaggtgcgcgggacggccgatggcgaaccttcgacccgcgatacgatctacttcaacgtggcgacggtggtacgcgatatcgcggtcggtgcgcggttgttgattgccgacggggagttggaactccgcgtgacggacaagaccgacgaggagctgatgtgcgagttcgtgcggggcggcacgctgcggtcgcgcaagagcgtcaatgtgccggggatgaagatcgacctgccgtcggtgacggaaaaagaccgccgcttcatcgaatgggccgtgaagaacgacgtcgatttcatcgctcactccttcgtgcggagcgccggggacgtgcatgccgtgcaggagattctcgaccgttacgacagtccgatcaagatcatctccaagatcgagaaccagcaggggatcgacaacctggacgaaatcgtcgaggcttcgtacggggtgatggtcgcccggggcgatctggggggcgaacttccggccgaggcgattcccaacgcgcagcggcgtatcgtggagcgttgcatagccgccaaacgaccggtgatcatcgctacgcagatgctctattcgatggtgcgctcgccccgtccgactcgggccgaggtgagcgacgtggccagtgccatttacgagcgcgtggatgccgtgatgttgagcgacgaaacggctatgggcgactatccggtggaggccgtgagtacgatgtcgcgcgtggcccgcgagatcgagaaggacgaaacgcattttacgccgatgatcgatatgaacatggtttccgtgaaccacgagatcacggcgcagttggcgcgttcggcggtgcgggccagtacgaacttgccgattcgctatgtggtgctcgataccgcgaccggacgcacgggccgttatctggccgctttccggggccggtgtcaggtcctggcggtttgttatacccgtcatgcgcagcgtattctggctctttcgtacggcgtcgtgccgatcctgcgtgaacagcagtcgcacgaacgctatcaggatcgttaccacttcgtgatcgacgccctggattttatccagcgcaagcatgcgatcgaaccgaccgatctgctggctgtggtgggcggcagcttcgattcgaaatacggcgcttcgtacctcgagatttcgagcgccgaacggttccgcgagcgggatgccgtgtgcgacggctgctaaatccgaagggtcgtgggaggtgaattgcgggacaaggtcgcaagcggtgtagcgtggagcattgccgaaaaggtaggctccatgttgctgcaaatgggggtgagtatcgtcatcctccggttgctgacgcccgagcagatgggtattatggctattcccgtggttttttcgtccctggcactggtgatggtggacagcggtttctcgcagaccctgatccgaaaggcggtgccgtcggaggaggactacaagtcggtattcgtcttcaatatcgcggtttcggtgctgctgtacctgctgttggtgggggcgatgccctggatcgcccgtttttacgggatgcccgagttggtgcggatcgctccggtgttgttcctgcttgtgcctctcaatgccctgtgcgtgattcagaatacgattttcacccggcagttccgtttcgcccggctttcgaaggtcgtttttacttcgtcgctcgtaagcggactggtggctatcggtatggcttgggccggatgcggtatctggagcctggtggggcaacgggtagtggcgatgggtgtacgggccatgttgctgtgggggttgagcgactggcgccctcgggcggctttcgacgcgggccgtctgcgtgcgatggctccgtatagcttccggttgctggcgaccgatctgatttcttccgtttacaacaatgtttcccagcttttcgtcgggaagctctatgctgcggatgtgctgggctttttcaaccaggcgcagaaactcaaggagctgcccgtgacatcgaccatgcaggccgttcagagcgtgacttttcccgcgctttccaagatcgcggacgacgagcgtaaattcgccgagagctaccggcaggtagtaatgatcgtcgctttcgtgatgctgccgatgatggccggtctgattgtcgtcgctcctgaaatggtggacagtctgctcggggagaagtggatgccgatggttccctattttcaggttatttcgctggccggaatgttcgctccgatcgctacggtttcgaataatgtgctgaaggtgaagagcaacggtcggatcatcgtgcggctggaagtggtcaagaaggtagtgatgaccctggtcctgatcctgacgatcccgcacagcgtgctcgccgtgacgtggggcctgtcggcgatggcttttttcgaaatgatcctcaattttggcgcgacgacccggtatgcggggctgacggcaggtcgttttctgcggacgttgctgcctatagcttctgcgacggcggcgatgttcggtgtggtttgggctttcggacacttcaccagcttcgcacctctgcctacgttcctattgaaagtggcggtcggcgtggtctgttacgctgggttcggagcgttgttccggctcgaagcgatgcgggtcgcgtgggaattagtaaaaaagctcttccggtaaaggaagagcttttttatatccggtttaaccgttttcgatcaatgcgaaaccatgtcgaatttgttcgggtatcgccgggtaccggaaacggagaaggctattatgcgtaaaccttcggggttctttcgccgcgcagtacactcagggcgttgagcatcaacgcacccatttcgtcttcgcccggatagatgaagatcggggcgaggaacgaacagtgttcgcggattacgtcgttcaccggttcgttgtacgccacgccgcccgtaagcaggatggcatccacctgacctttgagaaccgcagccatcgcgccgatctccttggcgatgctgtaactcatcgcgtcgagcacggctttggatttctggtcgcccttttcgatgtcgatgcagatctgttgcacggagttctggttcaggtgagctaccagaccgcctttgccggcgagcatcttcagcacgtcgcgctggctgtacttgcccgaaaagcagaggttcacgagcgctccggcaggcaccgtgcctgcacgttcgggtgcgatcgggccgtcgccgtcgagggcgttgttggtgtcgatcacccgtcccttgcagtgggccgaaaccgaaatgccgccgcccatgtgggcaacgaccaggttcaggtcttcgtaacgcttgcctaccttctcggcatggcggcgtgcgatggctttctggttcagggcgtggaagatcgaaatgcgggggcattccggaataccgctcaggcgggcgatgtcgtccagctcatcgaccacgaccgggtcggcgatgtaagccttcacgccggcagcctgggcgatctgctcggcgatcaggccgccgagattggaggcgtgttcgcgctgggcgttcaccaggtcgttcttcagagctgcgtttacttcatatacgcccgattcgatcggcttgatcagaccgccgcgaccgatcacggccgagagggacttcacgtcgaagttgttctttgcgagtgcttcgagtaccatctccttgcgccagtcgagctggtcgatgatgcgcgggaaacgtgcgatctcctcggccgaatggcgcagggtgagcgccagcgtaggctgctcgtcgtcatacagggcgatcttcgtcgaagtcgagcccgggttgattgctaaaatcttgaatcccataaatccgatacctgaattatttagcggccagacaagccagtgcgatcgagtagagtttggtgaggctggagtcgccgcgcgaagtcagcacgcagggaactttggttcccatgaccatcgctgcgatctcgccgccgcccatgtgcgtggaagccttgaagaagacgttgcccgattcgatgttggggaagagcaggcagtccgcatcgcctgcgacggaagaacccttgaccttcttgatctcggcggcttccttgtaaagcgctacgtcgagcgacagcggaccgtcgatgacgacgttacccagctgtccgcgatcgcccatcttggcgagcagagcggcttcggtcgaggagagcacgctcggcaacagctgctccgaaggtgcgatgcaggcgatcttcggcgtcttgataccgatcaggttggcgatgcgcgtcaggtagccgatcaggatggttttctgtttgaagtcgggctgcggaatcaccgctacgtccgagatgaccagcaacttgggatagttcggcatttcgactaccgctacgtggctcaacgtgcctttcggggggaacagacctgcgtccttgttcaggatgccgcgcatgtacttgtccgtggaaaccagacccttcatcagtacgtcggcctcgcccgtaacgacggcattgacagccagattgacgcacttcacgtcgttgctctcggggattattttgaaaatgttgcaatcgatattctcttccttgcaaacctgctcgatgatcttgggatcgccgaacagaatcggctctaccagaccttccttataagctgcatagacggctgccagcgtgtgggcgtcctgaccgtaagcgactgcaaggcgcttcttacctttttttcttgcctcttcgacaatttcactcaaatgttgcatgggttgtgtgtttttaatataattgtttggttatttattgacgatttcgtaagtgtcggtggcgatgaccagctcctcgttggtcggaacgacggccaccttgaccttcgaatccgctgcggaaatgatcttgttttcgccgcgaagaccttcgttgatcttccggtcgaagtgcacgcccataaattcgaggccttcgcagacctccttgcgggtttcgggtgagttctctccgacgccgcccgtgaaaacgatcagatcgacgccgcccatttcggccgcgtattcgccgacgaatttcttgatgcgcaggcagtacatgtcgcgggcgaggatcgcacgcggattaccctcttcataggctttgtcgatgtcgcgcatgtcgctcgatacgcccgatacgccgaagacgcccgattgcttgttgagcatgttgttcacttcggcatagctcatttgctccttttcgccgatgaaggtgaccgcgctcggatcgacgttgccgcagcgggtgcccatgaccagaccatcgaccggcgagaagcccatcgaggtatcgtaggacttgccgttcagcacggccgtgatcgaaccgccgttgccgatatgacaggtaataatcttggagttattgatatccagaccggcgagtttggcgccttcgcgggcgacgaacttgtggcttgtgccgtggaagccgtatttgcggatgccgtatttctggtagtactcgtagggcagggcgtacatgaagttggttgcgggaagcgtctggtggaacgaggtgtcgaatacggctacctgtttcacgccgggaaggactttttcgatggagaggatgccttcgaggttggccggattgtgcagcggggcgatctggaacagcgagcggatcttctcctggacctgttcggttaccagacagctctccgggaaaaattcgccgccgtgcgctacgcgatgaccgacggccttcacttcgtcgagcgaccggattacgccgtgcacggggtcggtcagggcctgaagcaccaggctgatgcccgtcgtgtgatcgggaatcggctggtggagctcgaacttctccttgccgacgggtttgtgcgtgagatcgccttcaggaaggccgatgcgctcgaccagacctttggcgagcagtttgctggactgggcttccatgtcgatcacctgatatttgatcgaagaactgccgcagttgagtactaaaatgaccatttcagttgttttataaaaattattttgttgtttccttgttcgttgtcagcgtttcagcaaccgtcccaatgcggtgcccagcaggatgcagcacacgcataccgcgaaattaagtgcaacgcaaagtccggccgccgtgtagtcgccgcttttgagcatccgcaccacgtcggaagagaaggtggaaaaggtggtgaatccgccgcagaatcctacgctcaacagccacgacgcagtacctgcgcccagtatctccagtaaaaagcccatcaacagcgatccggcggcattgaccgtgaaagtgcctgccgggaagcccaacagggactgttcgaccagccatacataggatacgaggtacctcgacatactgcccagggcccctccgattcctactgccacgatctcgcggatcatttcgtcgaaaatgcgtttttacttaagactttgcaaatttacgcaaaatttaattacggatcgtaaggtttttcggaatttttgtgatgaattttggattatctgtggttaattttcgtatttgtagcccaacccctttacggtcgagatatgtccgtttccgattttttgccggattttgcggacgtggacatcgatcgtacggtcgccgacgaccaccgtatcgccccagatacgggagtagatctcttcccgggagaagagttttccgggagaggaggcgagcagggcgagcagggcgaactccttgcggggcagttcgatacgttctccgtcgcggattaccagatgtcgttcccggtcgatgaccagcgaagccggcttgtcggcggcgacccgtttgagaatcgcctggatgcggctcagcagaagtttgggcttgatcggcttggggatgtagtcgtccgccccggcgccgaatcctgcgagttgttgctcctcttcgccgagggccgatagaaagacgaccatcgtttccttcagcgccgggtcgcggcgcagagcccggcaggtttcgatgccgtccatcacgggcatcatcatatcgagcaggatcaggtgcggccggtgtgccgcggcctgttgcaaaccttcggctccgttacgggccgtatatacctcataacccgcctttgtcaggttgtaacggatgaattcgaggatgtcgtcttcgtcgtcgatgagcaggatgcgatgactcataagagcgtgcgtaatttttgcgaagataataaaattatcggcaaatcctgtgcgggggccggaaaaatggttatatttgcaaggtttatatggttttgcaaaccgtaagattaaaatcagacaagatggctactgaaaattctactcttcctgtttccgaggagcatctcaactcttctgtggttgaggatacgcagaacaattccgtgcctgcagatggcggggaaacgaatgccgcagttgcggacgataccggcgtaccgacgcagagtcgggtggacttcgccgatgaagatgcggcgctggctgccgaaaatgcggggctcgacctgggcgaggcttcgcccgaggaggaggctgcaggcggagaagcggccggcagcgacctggcaggcaagtcgaaggaggagttgctggcgattttcgccaagatgctcgaagagcggccggtgcagtccctgcgccgggatgtggaggccctcaagatagcgttctacaaattgcgtcgggcggagtccgatgctgcgcgacgggctttcgtcgaagccggcggagcggagggggattttgtgtccgaaccggatccggcggagctgcgtttcaaggatcttttccgggagtaccgccgtttgcgggacgagttcgtcgccggactcgaagcggccaaggaggagaatctcaagataaagttgcagattatcgaggaactcaaggagctggcctcgtcggacgagatgctcaaccagactttcaataagttccgggagttgcagcaccgctggaaggaaaccggcgtggtgccccagcagaatgtgaaggatctgtgggagacctacaacctgcacgtggagaatttctacaatttcatcaagatcaacaaggagttgcgcgatctcgacctgaagaagaattacgagcagaagctggctctttgcgaacaggccgaagcgctggtgctcgaaccgtcgatcgtcgaggcgttccacaaactgcagaagctgcacgacgagtggcgtgaaatcggccctgtggccaatgaatataaagaggtgctgtggaatcgtttcaaggaggcttcgagccgtatcaacaagcagcatcaggagtttttcgagaatatcaagcaggagcagctccgcaatctggaactcaagagcgagctttgtgtcaaggccgaagagctggcgcagcagccgctgacttcgcgcaaagagtggaacaaggcgagcgagaagctcttcgagatacagaaagtctggaaaacgatcggattcgctcccaagaaagataacaatgccatctacgagcgtttccgcaatgcctgcgacaaattcttcgaggccaagcgtacctactatgccgggttgaagggcgagatggagcacaacctccagctcaagaccgagttgtgcgaggcggccgaagcgctgcgcgacagcgaggagtggaagaagacgaccgatgagttgatcgcattgcaggccaagtggaagcagacgggggccgtgtcgcgccgctattccgaccagatctggaaacggttccgtgcggcgtgcgacgctttcttcgagcgcaagtcccgacatttcgctgcggtggacgatcagtacggggagaatctccgtcggaaagaggctctgttggaggagatggctgcggccgatattctggcgggcggcttcgagatgattcgtgatttccagcgtcgctggggcgagatcgggttcgtgcctatcaagcagaaggaggcgattcaaaaacgttacaaggaggtggtcgataagatgttcgataccctgcgcagttcggagcgcgatcgttcgatggaccgcttcaaggagaaggtttcttcgctcaaggctacgggcgaccggcgtctgcgcacggagcgcgaccggctttacaacaaagtccgtcagttggagcaggacatcgccttgttggagaacaacatcgggttcttctccaagtcgaagaacgccgaggcgatgatcgccgaggtgcgggccaaaatcgagcgggccaaacaggagatgcaggccgctatcgaaaaagtgaagctcatcgatcaggaggagaataaggaataacccgccgaagacggtgtgctataacaggtaaactacttcgttattatcggtgtcacggctcgatcatgtacgccagtgcacactcttcgccgtgaacctcgatgccctggtatttttacctgttcctgcacacttgaaaggggatgcgccgaatttctcaatttgacacatccctttccggtgaggaaacttctttgtggggatagcggtgtattttatgtgagtccggccctcggagcgggaaggtttccggagcggtcttcgaaagcggttccggaacgatgttttaataggcaagtggagaaccgggcgttccggcttaagggttgaaacggagccggataaacgacggtgcaaacaaaataattcgaaacagataatgaaactcagcaaacccaagtacattttcgtgacgggcggcgtggcttcgtcgctcggtaaaggcattatttcggcgtcgatcgcccgcttgctgcaggcacgcggctattcggtgacgattcagaaattggatccctatatcaatatcgaccccggaaccctgaatccttacgagcacggagagtgttacgtgaccgaagacggtgcggaaaccgacctcgacctggggcattacgagcgtttcacttcgattacgaccagccatgccaacaacgtgaccaccggtaagatttatcagtgcgtgatcgacaaggagcgcaagggcgagtacctgggcaagaccgtgcaggtcattcctcatatcacggacgaaatcaagcgccgcattcaactgttggcgcagcgcaaggagtacgatgtgattatcaccgagatcggcggtacggtgggcgacatcgagtcgctgcccttcatcgaatcggtgcgtcagttgcgttaccagctcggagcccgcaatacggcgctggttcatctgacgctcattccttacctggccgcttccggcgagttgaagaccaagccgacccaacattcggtcaagaccttgctcgagaacggtttgcagcccgatattctggtgctgcgcaccgagcatccgctctctgcggagctcaggcgcaaggtggcgctcttctgcaacgtggatgccaacgcggtgatggagtcgatcgacgtaccgacgatctacgaagtgccgctggtgatgcaccgtcagcatctggacgaggtggtgctcagcaagctcgaccttccgtcggagcaggaacccgacttgagttcgttgcaggctttcgtcgataaggtgaagaatcccaagcggacgatcgacatcgccctggtgggtaaatatacggaacttcccgatgcttacaagtcgatctgcgagtcctttattcaagccggtgcggtgaacgactgcaaggtgaagctgcattacgtgaattcggagaagatagacgcttcgaacgtcggggagaagctcggcaaaatggccggtattctcgtggctccgggatttggcaaccggggaatcgaggggaagatcgaagcggtgcactttgcgcggactcgccgtattccgttcctgggaatctgtctggggatgcagtgcgccgtgatcgaattcgctcgcaacgtgctgggtttcaaggatgccacctcgacagaaatggacccggcgacgaagcatccggtcatcgacctgatggaggaacagaagggtattaccgccaaaggcggcacgatgcgtctgggggcttacccctgctcgctggagccgggatcgaaagctgcgcaggcttacggtacgacccagattcaggagcgtcatcgccaccgctatgaattcaacagcgaatacctgaaggatttcgagagccacggaatgaaagccgtcggtgcgaaccccgatacggggctggtcgaagtagtcgaaattcccgaccatccctggttcgtcggcacgcaataccatcccgaatacaagagcaccgtacagcggccccatccgcttttcgtcgcgttcgtagctgcggcgctggcgggaaaagacgataagaaaaaatagtttgcaaccctgtttcggggtatcctcaaagattttagattacgcatggataaaaaatcaatcgccggaattgtcatcgtggccctgatctttttgggtttcacgttctataattcgcatcaacagaaaaagtatcaggaacagctcatggcgtacaatgccgaacaggcgcgtatccaagccgagcaggattcgctcctggcgctcaacgctccgctgccgactgcggattctgcggctattgcggctgcgggagagcggttgtccggggacagcctgcaggcgcagcgtcggatcatgcagttcggagagctgctggctgcggcgcagcaggccgaagccgaggagttcaccgtggagaacgaggtattgaagatcgatttctcgacgcgcggcggccaggtcaaggatgttacgctgaaggattacaccaagtatgcgcctcgtgacgagcggaatcagccggtgcggcttttcgatccggcaacggccaatttcgccctgacgttctatgtgaagaatggtcataacaacgtattggtcaatacggcggattacaccttcaatctggtgtcgatggagaaggatgccgacggtgcgcagcgcatcacgatggatctgccggtggcgcgtgacgccgtgttacggtacgagtatgtcgtttataacatacagtcgccggcgcgggattatctggtcgatctgaatgtctatctgaaaaatatggcgccgcagatggccagccagacgactatcggcatcgactggagcaaccggtcctatcagaatgagaaagggtttcagaacgagaatacctatacgaccatctattaccgggctcccggcgagtcgtcggccgacgacctggggatgagcgacggggagaagcagaagacggtttcgtcgtcgctcaactgggtggctttcaagcagcagttcttctcgtcggtgatgatcgccccggagaacttctcctacgccgatatgaagtttacgacggcggaaaaaggctcgggttacataaaggatttttcggctaaattgacggttccctatacggcgcaaaccgaccattacaacttcgccttctatttcggtccgaacaaatacgccattctcaagcatgtggcgacgaccgagggggacgacgaactgcatctggaacggttgattccgctcggctggggtattttcggctgggtgaaccgctggttcgtgattccggtgttcgatttcctgcgtcagtttatcccgagtttcggcctgattatcctgatcctggccgtgctggtgaaggtcatcatctcgccgctgacctataagagttacatatcgacggccaagatgcgcgtcatcaagcccgaggtcgatgagctggccaagaaatatccgcgccaggaggatgccatgaagcgccagcaggcgacgatggagctctacaagaaggccggtatcaacccgatgggcggttgtatcccgctgttgatccagatgccgatcattattgctatgttccgcttcttccccgcttcgatcgagctgcgaggccagcatttcctttgggccgacgacctttcgtcgtacgacagcgtgttgtcgctgccgttcaacatccccttctacggagatcacgtgagcctgttcgccttgttgatgaccgtcgcgctgttcgccttctcgtatatcaattaccagcagacggcttcgtcgcagccccagatggccggtatgaagtttatgatggtttatctgatgccggtgatgatgctcctgtggttcaatagctattcgagcggtctgacttactactacttcctggccaacattctcacgatcggacagacgctcgtgatccgccggatgatcgacgacgagaaaattcatgccgtgatgcaggccaatgccgcaaaaaacaagaacaggaagaaatctaagttccagttgcgttacgaagagttgctgcgtcagcaggaggaggcgcaaaggaacgcttcccgacggaaataaccgaaaggtgcgaagttccctaacaagttttcgaaattgaaaatcacccctgtcagagttcatcctgacaggggtgataacttaaattcggactgttagagagccccttcattcgcacggcgctgtggatttcaggcgtgtcagtcgtagaggtcgaggtattcgtacgtatttccgaccagggagaggtagcgttcgaattcggggcgggaaatgaccaccgtggctcggcaatcgttggggtggaaactcaaactgtcgcacgtttgcagatgacggtctaaaaagagatgtacgtggtgttccgcgtcgttgataaggccgaacggcgacacggaacccggttcgagccccaggtagcgttccatgcgctgcggcgaggcgaaggtgagtttgccctgccgcagtcggcgttccagatcgtgaatcgccagcgagcggtcgcagtcgaaacagaccaaataatgacggtcgcccttgtggttgcggaagaagaggtttttgcaatgtttcgacccgtcctcgcgccaatatgccttggcctcttcgatggtcggggaagccgggtggtgatagatgtcgtaccggattttgtgtctgtcgagaaattcccggacgatcgtttcgcgttccatatcgactatttggattcggttcgagagcggatttattcgacgtaaagtaccaatcccttgaggtattcgccttcgggatgatagatgttgatcggatggtcggcgggctgggtcagttggtgcaggatgcggaccttgcgtccggcgatggctgcggccgagaagaccgtggtgcggaacaactccttgctgaccgcctgcgaacaggagaaagtgaagaggagccctccgcttttgatttgcgccagcgcccgggcattgagccgcttgtagccctgcatggcattgcccagcactttgtggtgcttggcgaaggccggcgggtcgaggatgatcatgtcgtaccggtcgccgatgtccttgaggtattcgacggcatcgacggccagcgaagtgtggggagcctcttctccgaagttgagccggacgttggcgtcggccagggcgacggcccgctccgaggagtcgatcgagcatacttcgcgtgccccgcccgcaagagcatataccgaaaatccgcccgtgtagcagaaggtgttgaggaccgtgcgtcctcgggcgtagcggcgtaccagttcgcggttgaagcgctggtcgatgaagaagcccgtcttctggccctcttcccagttgaccaggaacttttcgctgttttcgagcacggtgcggggcattcctcccgttttgccgtaaaggtatccgtccacgggattcaggccggccttgaacggtacggtttgggagcttttgtcgtagatggcggtgatccggtcgccgtaaaccgttcggatcgcatcggcgattgtcaggcgggcgtggtacatgcccaccgagtgacattggatcacggcggtcgtgtcgtaaatatcgacgacgagtcccggcagggagtctccctcgccgtgaaccagacggtagcaggtggtgtcgggagcatccgtgagtccgagcgtgcggcgcacgtcgagtgcggtggcgatcatccgctgccaccaggccgcgtcgatcggttcctgttcgaaggtgagcacccgcacggcgatcgagccgatctggtaatgtccccgggcgatgaagtcgcccgaacgggtatagacatcgacgagggcgccttcgggaatttcgcttccgtcgtaacggacggattcgatcgcgcccgagaaaatccagggatggcggcgcagcaacgactcttccttgccgcgccggaggtgtatttgcgggatcatttcttcgttttctttggtttgggtgtgtgcagcagccggtcgtagatacgtgtgcagacccaggcgtccgttgcggcgtagagctgttgcttgtcggtgagttgtgcggcttcccagttgctcaagcgctgggctttggatacccgctggccgagtacgatcgccgagagtttgcgcaggcttttctcttcgatgccccactctccggcgagctcctgaaggtccacgaagcccgcttcctggaaatgtcggatgttgtgcagtgcccgcaggtcgcccttcacgtcggcgcctattttcaggatctccttgttttcgaggattttgacgatggctttgtcgagaggtatcttgcagagccggaacaggaagctctgttccggggaggagagttgcagcagagcgacccgattgacgacgcccgcccggaacgaaggccgggtttcggtgtcgaagccgatgacgggctgtgccgccaggtagcggcaggcctccttgagtcccggttccgagtccacgacgacgatcggccctcggaattcgatggccggaagcagagcggcctcctcgttgctgatgctattttgaaatgtgagcggtttgttcatgaaatcgcgcaaagttaccgattaatcgtgacttttccatccgggagtatggaaattttgccttcgccgctcaatttgcgtaggagctcggcgatttgtgccggatcggaccggagcgcagcgacgatttcccggggatcgagagcgtcgttgcggagcagctccagaacggccttttccgaggcgttcgcctgcggagcgcgggcggcgcgtttgcgggcgaggcagaggtcgcagataccgcactcccggggctccggcactccgaaataggcttccaggagggagctgcggcagccggtttccgccgtggcgtaggcgagcatccgctcgaatcgttcgtgggtcagttcccggcgctgccggtacgactccggggagatgtagagatcggcggtggggagccgttcttcgtccatgtaaaggagcggcgagcggttcgaggggatgtagcggatcacgcgcaactgccagagccgtttcagcaggtcgtgcaccttttcgggcgtatagccgctccaggtcgctatttccgtttcgtcgatgggacggaagtcggtgaaaaccccttcgtacagacgcagcagaacacggatgatgtggtccagatcgtcgcggatcacccgcaggcggtagagatcgtcgcggctgacgcagaagaggatgcgcgcggggttggccgcttcgtccatgagggtcatgtagccgttctgactcaggatcttcagggcgttctgtaccagacccgtatagaggtgctcccgggtgcagaaatcgcgcaggttgaacagaaaggaactttgggcaccgtcgccgatggcgatctggaggtagctgcagattttttcgtagatcgaacggatcttttcgagcggcgggtagtccgcttcgaagcgtttggcgatgcgttccgcatcgtcggaagaaatcagcaatacggcatagctgcgccgcccgtcgcgtccggcacgtccggcctcctgatagtagctttcgagcgagtcgcacatcgtataatgtaccacgtagcggacgtcgggcttgtcgatccccatcccgaaggcattggtagcgaccatgacgggggtacgccccgaaatccaggcttcctgccgcatcgagcgctcggcgtgtcccagcccgccgtgataatattctgcggagataccttcgtcgcgcaggaaagccgcgacctgttcggctccttcgcgggtgcggacatagacgatgccggaaccgccgacgttgcggatgatccgcaggagctgttcgtttttgtcgtcggtatggcgcacggcataagagaggttgggacgcgaaaaatcgctgcgcagcagatggggttccgcgaagcgcagcttttccatgatgtcgtccgcgacgcgcggtgtggccgaggccgtgagagccagcacggggacgccgggaatccgctcgcgcagctcggcgatccgcaggtaggagggccggaaatcgtagccccattgggagatgcagtgggcctcatcgacggcgagaagcgatacgttcattcgctgcacccgcaggcggaaggcctcggatgcgagccgttcgggagcgacgtagaggaatttcacgtcgccatagacgcagttgtccaggtcgatgtcgatctgccgggccgacaggcccgaatggatcgccagagcacggatgcccagcttgcggagccgatcgacctggtctttcatcagggcgatcagcggggtgaccacgatgcatacgccctccgaagccagtcccggaatttgataggtgagcgacttgccgccgcccgtgggcatcagggccagcgtatcgcgtccggcgagcaccgagaggatgacctgttcctgcacggggcggaacgtgtcgaacccccagtagcgcttgagcagcgctgcgatctgttgccgtctgttcggtgctgtcgattccatatacacaaaggtagtgtttttggcttttacccgagcccggaggggataaaaagtgcgtcatattaggtttctcgaaatattttcctatatttgcacgttgaagaagaaaaccgaccgatgagaatcaaagaggaatataaggtccgtgaaatggcaggcgagcatatcgtggtgatgcagggccgttacggagtggatatgaccaaagtgattgcattgaacgaaacctcgctctggttgtggaaccggttgcagggacgtgagttcggtaccgacgatgtccgcgatttgctcctcggcgagtacgacgtggatgcggaaaccgccgagcgcgacgcccaggcgtgggtcgcccggctcaaaacgtgtaatttagtcgaagaatgagcgtaaagctgcgcagatatatgtccgtgtggatgctgctggtcgcctactgtttctcggtaggagcagcggcatacgccgtactttcgtgccactgtatggggcaggagaaaggcgaggtgcatatatgctgccggggttgcgacatccataccgaatgcgattcgcattcggccggttttaaggccgtttgctgcggagtggatcactccaaggtgtcggagctatatacttccgtatcgtcttcccaatgggagcgtgatacgaaggtcatgatcgtcgatcttcctgccatattggcagcggagatgacggcgattccgttcgattccgttcattgggcgacggtttctgaacgtctctgtctggcccatagcacggtccatcttctctcttccggactgcgtgctcctcccgttttcgtgtaacgacgcatgaaaaagtgcagtgcctgcgtgtactgtgtttttcctgcaacaggccggttgcccgatttgcaaccggattgcaagaatggaatattatttttgcatcatgtttacacaatcaacggaaaatcaaatgaaattcaagtatttagcagtattagtcttttttgttgcatcggcattcggcgcggctcgggctcagaatgtcaaaggtgtcgtatatggagccgacacggacgagccgctgatcggtgcatcggtgtactgggccggaacgacggtgggaaccggtgccgatgccgaaggaaattataccatacaccgggttaagggatacgatatgctggtcgccggcttcgtcggatataccagcgatacgattcgcgtcgagagcggcgtggagcgggtcgattttcgtctgtcgaacgacggggtggaactcgaggaggtcgtggtgaacagtacgctgggcggtaactacgtgaagcgggacggcattctcaaaggggagatgatctccttcgcgggcctctgcaagatggcttgttgcaacctggccgagagtttcgagaactccgcttcggtgacagtcggttacagcgacgccatttcgggtgcgcgtcagatcaagatgctcggtttggccggcacttacacgcaaatattggacgaaaaccgtccgatcatgcgcggtttgagtgctccctacggcctgagctatacgccgggcatgtggctcaattcgatccaggtgtcgaagggtatttcgtccgtgactgccggacatgaggccatcaccggacagatcaacctcgagcaccgcaaaccgaccgacgacgagcggctgttcatcaacttctaccttgacgacgaactgcgtcccgagctgaacctttcgacggcgcttcctgtaaccaaggataagaaattatcgacgatcctcctgttgcacggatcgttggatactcatttgttgggcgacatggacgacaacggcgacggatttatggatctgccgaaaacccgcctgggagcggttgcaaaccgctggctttatacggccgacaacggcgcgcaggtgcgatggggtttcaagtatctggcggaaaatcgcctgagcggtcagaagcactacaaggcttcgatgcgtgaagagatggataccgactgggacaagggggccatgtacggctcgcagatcaagaaccgcgagctgaacgcctacttcaaattcggtatgccggtcggtcccggtgtctatgacgaggaccagcaggacgagcttcgttcgaacatcgctttcgtggccgattacgaccgcttccgcgaacgggcctacttcgggctcaacgattacgacggtacggacaacatggtttcgctgaacatgatgtacaaccactatttctccttccgtcattcgctgatcgtcggcgtgcagtcgcatctgcaattccttgacgagtcgctgctcaacccgacgccgtggctggatgccgccggagcctggaatctcgaccgtcaggagaacgaggtaggcgcctatgccgaatatacctacacgatcaaggacaagctctccgtagttgcgggcatacgcggggactacaacggttattacgataagttctacgttactccgcgcggtcatatcaagtggaacatcaccccgacgacgatcctgcgcggttcggccgggctgggttatcgttcgaccaacgtcatcaccgataatatcggcgttttggctacgggacggcatattacgttcgaaagaccgacggctctttcggcgggagccgccgctgtgcgcggacctctcaatcccggctctgcttacgggggatatacgacctggatggtcgcagacggcggtgcgggcaatttcaaagcgctcaaccggatggagaaagccctcaccgcaggcggtagcctgacgcagattttcacgctcgtgaaagaggaggacgcgacgttgagtttcgactacttccgcacgcaattttataattcggtgattgccgatcaggagtattcgccgaacgacatttatatttacagctcggacaaacgctcctttaccgatacttatcaggtcgatttttcgtggactccggtggagcggttcgatattttcgctacgtaccgctatacgaacagccgtatgacgatcgatcgtccggacggcagtacggcgctcgtggagcgtccgctggtaagccgttacaaggcgctgctcaacttgcagtattcgacccgctacaaccgctgggtgttcgatgtgacggctcagctcaacggtccttcgcgcctgccgacccagacgggcgacctggccgattccgagatgtcgccgacgtatccgatgttcttcgcgcaggtgacccgcaaagtcggcaagttcgatatttacgtgggctgcgagaacattctcgattataagcagaagcacccgattctgaatgcggacgatcctttctcggcgggtttcaactcgtcggtgatctggggacctctgatggggcgcaagttttatgcgggattgcgtatcaatttttattgattgaaagaacgaattaaattagttatacgacgatgaaaaaaatgattttgtgctgcctcgtggcagtattgggatgcggggtgttcgccgtggaagcgaagacgccgcagaagaagggcgagatcgttactacggtgttcaccatcgatatcgattgcgaaagctgtgcggcccgcattatgaacaacgtgccggtaatcggcaaggggatcaaggatattcaggtcgatgttccctcgaaagaggcgaccgtgacctatgacagtgccaagacctcgcccgaggagctgatcaaaggattcggaaagatccggatcaaggcggaagaaaaacctggtaaatagttatatatgggttagttaatttggatggagagccggggttccgaaaggaatcccggcttttttcgatcggcgaacgtcccctcagggaagaggtacccgatcggagcaaaacggacggaatgcatccgtaaataaaggaagagcacgcgtcgtaccattggtattttagaacttttccgcgatctttgaggcggcaataccccacagcgtgttgtgtattggaaaacattcactaactttgcggtgccgtccccgcggatggcgacatattgtttagtgaaagtgtttcgctaatccttgacagtaaaatttggcgattttaaggaaacaagggtaggcaatacagacactcgtcaccgtgtataggcatatatcgttcccgatatattctattcggtgtggggtattgtttatttgtttccgggctacgccaaatgcctactgtcggataaacgaacgactccacacttgaactgaaatctgtaatttactattttatagtcaagaatattctgtcaaaatcaagccaatgcaaagtcgaactatcataggcaagactacattgcgttccctatcatcccatgggaatcttgctttcggctcaatatttggttctcgtaccttaatccatgtatcaaataagtatattgcctcttcctctgaaatgtttaaaatttcttggcgtgaaagggctgacttaagagcatttttatcatttgattctacaagataggatagggcggcattaaatctaacttcagcgacaagaggaagtgcgagttggtttatatttgaattatatgttattgattttgtccttatgcttcggttataagatagtaacgaccagttccgacatatttttcgatatatccgcgtaaacctgaattccaaaatgtcccatgagtagcaatgttgaaaccatgggtatgtgtcattcctgccttttcttcatttttaatttcttttaagcacaattcgtaatacttcttaaatcggaactttatttatatcttgattctgtcttctattgtatttgcgcaatacaagatcaggatgtcccagaagtcgtggatgattcagcctataccgaaatccatggccaaacaagaacttccgtaccagcaattccgggtttgtatttttaccttttattgctgacatacaacggtgcctctgctctttggtctgtttgtccatatcaaaatagagaacaacatatcatattctatcaaagaatccctcgtatttttcatctataatcttccactctcccattttacgtcttctgatacgagttatcttgccaagttcttgcagccgtttcagatacttctgaatctggcgtgtggacaaccctatgctctctgccgtctgtcctgccctgatttgcggattttgggaaatcagtttgtaaatctggcgacttgtttttatgaactcttttgcgaacttggatggctcttttacgtctacctctccattgccttttacgagctcttgcatcaaaggactgccactgggcgtaatttccccagtaactttatccttaaaattcaaattccaaagggttacatggaactcggaagcattggtggtaaattcaggtgcacggtagcctgcaagatgttcataagatttataggcattgataattttcttcatttcactgcctcgtcttttcataagtcctaaccgactgaagaaatctgccaataacggattccttcttttagatggcacggtaaggggattttgctgctgaataagcctcctgtccatcataccttcgggagagtagattttcaaccggtcatcatacatatcatctgatttcacttcccatctgcatatagtcccgatgaatgattgcgttcgctatcgcttctgttacggcacgttcgggataatccggcaattcttctcgatgatcactctctttccaccatttcttccgggaattgttccgcacaaaagatacggcatattgcaactggccgattacgaaccctctgggacaacatcgtctatcgcttcgcccaagccgctgggtatatccaaaccgttccatcgagtacagaatatgcgtgactgttgtactggagattcattagctaacaatgccccggtatttgtcaaattaccatttttggtcacttggacatttggggtgatgggagggcgacagtcaagcgtgaggacagccttttggacgagtcgcccgcagcgtttgatctgtaacagccggaggtcgtatattccggctgcggtgctgcaggtcagtagcgccgtttgatatattcatccagcaatttcttccgatgttcaggactgattccgcttggtatcctcaccttggatttcaggtcagaaaacaagccttcaagtgcattgttggtattcagaagtcctgtttcggatggtcatagaaagtctataatagcggcatatttcgttttacactaaggtaggcgctacgaagccaggtctcatgtagggaggagttttacgcttaattctcttgtcttggactcgttcattgacgatatctttgtacttttcataccaatcattgaaagcgccaacaaagctttccttgttcatcttagtgatattatttgctagcttcaattgctctgcatatgattctatatcaaggtcttggttagatgtctgcgagctgtcaggatctgatggaattgacacatcaggaccttaataggctttagcgcctgaggcaaacctttcatcccatctattacaactccatatatcttgaaccccttgctcttaagccattcaataccttcaacatagtaggctatcgtttcgtgagtcacatacttatgccacagaacgacgcctattagagcgtcacgaacaaccatcagaccaaagttcctgtcccagtaagtgatgtccatctgtatagtcactttcttgtactttgcaatcttgtagacgtatctcatactttcaagatcacagaggatagttttctctgaaatgccatgcttaagggcgagttgattaagcgtttgtttgccctctacacagtcggttattacctgtgatttatctcggcgaatgccatcatcaaaacgacgccacaatcgttacatttataccgttgactgcggacccttaggccattcctgatcacatttttagaaccgcagaaaaagcattttttcaatcataccaattaagatgcttgcaaataaatgaaaatcaatttattgtgtgtattctgttgcccggaaagccttttttttccccccccccgtcgaattttcagaactccccgcggcttggcgatcgccgggcttgtcatatcgtgtatcgcgttgatcgttttgattatcttggtgagtgcgatcgcttccctggtgtaatcatttcagttggtatgaagaaagagtatccttctgttcaggatactctttcttgtattggcgatacttgaagctttaatatctccggtttttcaattccggatacagtttgtcgaacggcgaaagatcgctctaatccggtgcatcgagcattatgttgcagccatcgttgttcttcggagaagccttgaattccgtgtaactgtctggctaaaggagctatttgcgcagtttgtcctgccgttcgcgctccttgcggcgcatcgagcgatagctgtttcccatcagcgccagaagcagcagcaccgtgacccaggcgcggactttgtcgcccgtggccgcagtaccgcatgtataaacggtgatgagcattgccaaactgcatgctaaaaggatcatgcagaacctgagcagccgccgaagcgatcttacagaggccatacgagatcttgttttggtttattcttccggttttaccaattgaatgtgtaactcgtcgagctgcgcctggtcgatatagcccggtgcgtcgagcatcatgtcgcggccgttgttgtttttcgggaaggcgatgtagtcgcggatcgactccgaaccgccgaagagcgagcagagccggtcgaaaccgaaggccagaccgccgtgagggggtgcgccgtacttgaaggcgttcatcaggaagccgaaacgctcctgcgcttgttccgccgtgaagcccagcaactcgaacatcttggcctgcagtttcgagtcgtggatacggatcgagccgccgccgatctcggtgccgttacagacgaagtcgtaggcgttggcccgcacgcgaccggggtcgctgtccaggtattgtacgtcttcgagcttgggcgaggtgaacggatggtgcacggcgtagtaacgctgggtctcgtcgtcccactcgaacagcgggaagtcgatgacccacagcggagcgaacttcttcgggtcgcgcaggcccagctgctgagcgacctccagacgcagggcgcagagctgggtgagggtcttgaatttcttgccgcagaggattagcaccaggtcgccggcttttgcgcccgcgcgttcggccatcgcccgcacctgctcgggcgagtagaatttatcgacggacgacttgacgttgccgtccgcttcgacgcggatccagacgagtcccttggcaccgatctgctggcgtttgacgaactccgtgagggcgtcgatctgtttgcgggtgtagccggcgcagcccgtcgcggcgaagccggtgacgtactccgcgtcgtcgaaaaccgcgaagccgtgaccttgggccaggtccgtcaggtcggcgaactccataccgaagcgcaggtcgggtttgtccgagccgtatttctccatcgcttcgatccagggcatgcggcgcagcggctccgtaagttcgatgcccatcacttcgcggaacatgtgcttggcccagcgctcgaagatttcgagcacgtcctcctgctcgacgaacgacatttcgcagtcgatctgcgtgaattcgggctggcggtcggcccgcaggtcttcgtcgcggaaacagcgcacgatctggaagtatttgtcgtagccggcgaccatcagcagctgcttgagggtctggggcgactggggcagggcgtagaattggttggggctcatgcggctcgggacgacgaagtcgcgggcgccttcgggcgtggaattgaccaggtagggggtttcgatctccaggaaaccttcgtcgctcaggaagcggcgaatctcctgggccatcttgtgacgcaggatcatgttgcgctgcaggggaggacggcgcaggtcgaggtagcggtatttcatacgcaggtcgtcgccgccgtccgagttctcctcgatggtgaacgggggcacttcggcctcgtgcagcaccacgagcttcgaggcgacgacttcgatgtcgcccgtaggcatcttcgggttcttggacgaacgctctaccacgcggccttcgacctgaaggacgtattcgcggcccagtccgccggccacggccttgacatcggccggagagtgttcttcgacgacgatctgggtgatgccgtaacggtcccgcaggtcgatgaaggtcatcgcacccaggttgcggactttctgcacccagccggccagggtgaccgtttcgtttacatttgcggcacgcaactggccgcaggtatgggttctgtacatggtcgtatctgtttttttcgttgttgtcgtattgtgattcacaaaggtagtgaaaacgaaggtataaaaaacaaactcgcgcgttttttataccggatgccatctctttccttcgacaggggaggtgtgcgaggctgaatccggcgggttcgtcgggaggggtggcggcgactttccgtcttttgtaaaggaagaaaagtgagtgcggagtggtgcgaactaattcgtttcttgtcggaattcctgctatttacgaatacaggcagaacggaagagaggcggcgatgtggagccgggtgaaaattagaggcatatcggattttccgttaaattattaattttgccgaaaaaccgaaacgatggaacagcagcaaaccgatgaaaaattcatgcgcctggcactaaacgaggcggaaaaagcgttagaagagcaggaagtacccatcggtgccgtggtggtcgcggacggacgtatcgtcggccgggggcacaacctggtcgaaaccttggcggacgctacggctcatgcggaaatgcaggccctgacagccgcagcctcgaccgtcggaggcaaatacttgtccgaatgtacgttgtatgtgacggtcgagccttgcatcatgtgtgcgggggcgattgcgtggagccaggtggggcgggtggtctatggcgccgacgatccgaagcgtggctatcgccgctattcggagcaggtgtttccgccccgaacgacggtgacgcggggggtattggccgaggagtgcgagaggctcgtccgttcgttcttcgccgcgttgagaaggtgatttttggaaagtgccgaaaaaaaactaaatttgcattccctgctttccggcgggagtttcgacggatggttgcgacctacaggacggggcgatatttccgatgggtttgcagggaatggtgataaaaatggacggaaccaattttaacctataatttatacaatatttatgaaaaaacttttgatttccgcgcttgccctgttcgttgtggggtctgtggctgcgcaggaaggattgggcgaaacttacaataaggctgtcgccgcttacaattcgaaggattttgcatccgcagctacggctttcgaaacgcttatcgatcaggggctcgattccgaggatctcgatgtccagagttgggttgcaacggccaagaagagtgtgccggtgtgctatttccaaatgggtcttacggctgctaagggaaatgatttcaacacggcggtcgagaatcttaccaagtcggccaataaggcggctctttacggtgagttgcagcaggagcgtatgtcgaatatgttgatggcgaagatatatctgatgtggggcggaaagcctttcaacgaaaagaactacgccgaggctgctgaaattttcgccaaaggttatgccgccgatccgaaaaatatggagatggccaacttcttgggcatttgctattgcgagctgggcgacttccagaaaggtttggttattttcaacgaaatcgcttctcaggacaatcccaaatatgcggaggatgtcgtgaaggtaaaggagaacatcaagctctataccaataaccgtattgccaagttgcagggcgagaatgatttcgacggtattatcgccgttgccgacgagatgctggccgtgaatccgcaggatgcgctggcccagaagattcgtttgcaggtactcttcgacaagaaggattacgctggcgtgatcgcttctgctgaggaggctgctgccgtgcagaccgacgaagaggagcgcagcgacgtttatttcattttgggtgcagcttacaatgcccgcacgatgccccagcaggcgatcgacgccctttcgaaagtaacggccggtgcgaatgtggctgcggcacagaaaacggtggcacagcttaaggagaacgcagccaaagcgaacagttagcggggtattcctgtttttgaaatgcggggcagactttttcggaagtctgccccgttttattcgaaagggctttgacttccgggatgcacgcgggggcggttcagcggatggttttgcactttatcgcggcgggtcggttgtcgggccgattcaggaggagcgggagcctttgtgccgcaagtcggggcggtggcggtgagccggccggtcgggttccggttttcctgtcctttcgtacggaaggtttcccgaacagcctgcggacaatatccggagaggtttcgggtcggtttgctgtctgcctctccgcccaatggcgggccctactcttcgttcttttcctggtttatccgcacgttttgctggatgcgccgcagtccgctgcgtgcgagaggtgtattgccgaaccgcaggagaaactcctcttcgctcattgcgagccactcccgatccgaaatcgtcagcgggtcgaacaggggatcgaaatgcggcgagcggtgcatgggggctttttggttgtggggacagcagctctggcagcgatcgcagccgaagatccatccgtcgaggtcgggcagggcgctgtcggactccttttcgatcgtacgacaggagatgcaacggttcgtgtcgatcaccttgggcgcgacgatggctcccgtcggacaactgtccaggcagttccggcagcggccgcaacgggctcctgcgaacggagcatcgtactggtcggacggcagggtaagtaccaactcgcccagcaggacataggagccgtattggggcgtgagcagcagggattgccgcccgatccagcccagacccgcttcgacggccagttgtttttccagcagcggagccgtatcgacgaacgtgcggcccgtgagcccggggtattgccggcgcagggcttcgagcatcgtgcccagcatccccttgaggacggggtggtagtcgcggctgcgggcgtaggaggcgatttttgtgcggcacccgggcggatagccttcgcccagcgggttcttgtagctcacggcgcagaccacgaccgtctgcgccccttcgaccaagtgtcggacgtcgaaacgtttgtcgaggttgcgttcgaggtattccagcgaggaaccgtagcctttggcgagccattcgcggaagtaggattcgttctccgcaagatgtttgcagggcgtgattccgcagaggtcgaagcctgcattctcggcaagttttttgatgtattgaccagagatcatggcgataattcggctcaaaaatagtgtatttacggcaaataatagtaaatttgccccgagtatattctcattttaattcgaaagaaaatgactatccatacactttacgaactggttcagtacagtgtaaagagttttgcatcgaaagtcgcttttgccatgtacggcggggaggagctctcctatgccgaggtgggaacccgcgtcaaacacgtgcaggaccttttgatcggagccggtttgaaagcgggcgacaaggtggcgctgttgagcagcaacatgcccaactggtgcgtttcgtacctggccgtcacctctgccggcatggtcgccgtgccgatcctgcccgatttctcgaccgaagagctggagatgattatcgcccactccgaggccaaggcgctgatggtttccgacaagctcttcgctaaattggcgaagtccacgatcgaatccctccatatcgtgattcgtaccaagaatctgggcgtgatcgcctcccgtcctgcggcggagaagggagcggtcggaattccgaatcccgaagacctcgcggtcatcatctatacctcgggtacgacgtcgcgtcccaagggcgtgatgctctcccacgcgaatctctgtgcgcagatttccatgagcgccgccattttcccgatctttcccgacgatacgtttctctcggtgctgccgttggcgcacacctacgagtgctcgataggtatgatctatcctttctcgatgggggcccgggtcgtttacctggatcgtccgcctacggcctcggttctgatgccgacgcttgccgaggtacggccttcggtgatgctcatcgtgccgctgattatcgaaaagatttatcgtcatcagattctcgccaagtttacctccagcggattctggcgtgcgctctacaagatcgatttcatgcgccgttatctgcatcgtgtcgcgggtaagaagttgatgaaggtcttcggcgggcggctgcgcttcctcggtatcgggggtgcgaagctggacggcggcgccgagaagttcctgctcgaagcccgttttccgtacgctatcggctatggcttgacggagacggcacccctgttggccggtgcagctccctcgcaggtgcgcctgggttcgaccgggcctgccgcgccgggcgttgagctgcggttggagaacgtcaatcccgaaacccgccagggcgagatcgttgccaagacgccgagcgccatgatcggttactataagaaccccgacgctacgaaggaggtcttcaccgaggacggatggttccgtaccggagatttgggcgaattttcggccgacgggtggctttacatcaagggtcggctgaagaatatgatcgtcggtcccagtggtgagaatatctatcccgaggatatcgagagcgtcctcaattcgcacgtctgcgtcgccgattcggtggttaccgagcacgaaggccgcctggtggcgctcgtgcatttcaataccgacgctctcgaagccaagttcgacggctggaaggaggatttcgagaattggaaggagaatctcaagaaggaggtcgtcgattatgtgaattccaaggtcaatcgtttctcgcgtatctccgaggtcgtggaggagaagcaggagttcgtcaagactccgacgcagaagatccgacgtttcctctataccaagcgcaaccctcaccagaaacacgaaatgtccaagcggtaggggtgtgtatgcagttatgattcaggtgcagatttcggtttgcgcctgaatcttttttcggacggtcgggttgcttcccgatcgtttcctttggccggagctcgtcccgactttccgatagagctgagctgtgtctgtgtcggggcagtgcggaccggatgccgctgtttcggttccgtatgctcgttcgtgtctgttgcctccggcggaatgtgcagcggtcgaggttttaccggagcgtctgtttttcggatcccgatttgtacggcacaccgccacttcgcgttgtccggtttcccgggaagagggatttcttgcagcgtgaacttcgcaatttctactttgagggttgcggacgctgaaggcgttggcaaaataaaatcggaaaagacgcacgggtcttttccgatttcgttgtatggattgttcgcagtcggcaggacggatttttcccggatcattcgggaatttgcaccgagtccgacggtgtggacagatcgggatggatcaactcgttttcataaatgcccagcgtgcggtagtagtcgttgagctgggccagcacgtcttggcgtcccatgtaggccgccagatagtagagccggtcgagcgattgcatcttgtcgatgagtgtctgcgtgaccatgtcgccctgaatgccttggaaatcgaggtagtagtcgatatactgcatcaggttgcgggcatagctcatcagcaggccgtcgcccttgtccggggcaccggccatgtagtagccttcgatgaaggggagggtgttggcgtcggtgtagcggatctgttggggcggcagtttttcgagccccatgtcgagcagccggatcgcctgtgtcgaatccccacggaaaacatactccttggctgcacgggcgaaggattcgcgggctttcgaggcgctcagggtatgttggatggtgtggtcggcgtaggttcggggatcgctcaggtttccgtaacggaatgtttcggtcagcaacggcgttacgtagtccggatcgacacgcccgatctcctgcacgttcctgcatggcgtgtagatcggtaccagccggtaagtgtaaccgtcgaactggaggtaatcgagcagcccgagcgattgcaacgtgtaaacctgtgtgaaatggatcggacgcttccagtcgaaatgggccagcatgtcgagcagcatcatctcgctcttgtcgatcgcccgtttgggcagttccatgtagatcgtatccaccatcaggtcacgatcggcttccttgacgatgcccgaggcgatcgcgttgtccttgtttacgggcagggcgaaacggttgctcggcaggtagtcgattttgcttccgttgctcagaacaagtttggtgcgcggatcttcgttgcggataaaatcgatggcctctttcagctccaacgggcggtccacgatgttttctatgggcagcatgtcgttggtgtaggtgtatttgctgcgtggcagcgtgaaggggatgcccggcgcatcgttggctttggttttcagttcgtcgatgtaccattcggcgcccaggtagctcgtgttcatgatccgcacgtccgggcgcacgccgtccacctcctgattgaaccacagggggaaagtgtcgttatccccgtagttgatgacgatggcgttgggcagtaccgattgcaggtagttccagccgatgtcgcgggccatcgtgcggtgcgaacggtcgtgatcgtcccagttctgggccgcgagaatgcccggtacgaccatgcagacgaccgtagcggctatgggagccatgaggcccttgcgtcgggtggcccagacgatcaggtcgcgcacggcgagtacgcccaggccgatccagatgcagaaggcgtagaacgaacccgcataaacatagtcgcgttcgcgcggttcgttgggcgaggtgttgaagtaaaccaccagcgcgatgcccatcatcacgaagagccacatgacgatcgagaagttgcgcggatcgcggttgagctgatagatcaggccgataagacccaacaggaaggggaggaaatagtaggtgttgcgccccttgttattcgctatttcgtccggcaggttgtcctgcggcccgaggtaaagctcgtcgatccacttgatgcccgagagccagttgccgtcggtgatgatcgcgtcggtaggctggatgtcgctctggcgccccacgaaattccagaggaaatagcgccagtacatgtggttgagctggtaggtgaagaaatagttgaggttctcgcggaacgtcggctccacgattaccagcggttcgtagcccgaaccgtcgtcccaaagcgtccggcgtccgaaatcgagcacttcgatcttgttcgggcgtccctgcgcgtcgcggacgatttcgccgttttcatcccgttcgtaatcggtccgggtgcggtaggcgctccatgatttgtaactctccttgctggcagcgtagttccacatacgggggaacagatgcatgaactcgtcggggtgttcgtacccggagatgatcgaaaccgttttgtacttgccgtcgtcgtccaggtagcggacatccttgtatttgtaaccggaggtcggggccgagaactggggaccgtagagcagcggtttgtctccgtactggtcgcggttgagcagcgaatagagggcgaacggattgctcgggttgttgctgttcatcgggggattggccgcggcgcggatcgtaaccgatgcgtaggacgagtagccgatgaggatcatcagcgtcgagagcagcacgagattgagcaccgtgcgcccttttttatgggtgaaatatacgcccatgccgagcgctcccaacagggctactacgaagaacacgaggccggaattgacgggcaatcccagtgaattgacgaagaagaggtcgaacaaggcgccgatatagaccgtatgggggatgatgatactgttgatgaaaaccagaatcgcgcccgaaatgagggtgctgaccgcaatacctttgaacgtgatgcgctgcgttttgcggaaatagtagatgaataccagcgcgggaacggtcagcaggttgaggatgtgcacgccgatcgaaagccccatcaggtaggcgatcagcacgatccagcgcatcgagtggggctggtcggcctgttcctcccatttgagcatgagccacaccaccagggcggtgaacatcgacgagagggcatatacttcgccttcgatggccgagaaccagaaggtgtcggtgaaggtataggcgagtgctccgaccgcacctgtacccaatacggccacgatgttggcttttgtaagctccgcgccctgacgggtaaggatgcggcgtgccaggtgggtgatcgtccagaaaaggaacaggatgcagaacgcgctggccaagcagttcatggcgttcaccatgtggggtacatagtacgtcgagggtgccagtatcgtggccaggcgggccagcagcatgaagagcggtgctccgggcgggtgccctacttcgagtttatacgaggtagcgatgaattcggagcagtcccacaggctcgaagagggctccatggtcagcagataggtcatggccgcgatagcgaagacgatccagccgacgatgttgttccagcgtttgtagctattcatttgagtttcggtttgtccgcaaaacggcatgtcccctgcgtgcgaagtcgaacgttcagttttttagggcagtccgtcggatttaagtctgttgttgtgtacaaatacgatgaaagccgggtgcaaaatcgattttgctggattttgccgcaacgggtttcctgtactctgcaaagatactaagataacgcttaaatcgggtgtttatttttgttttttgttcggattctttgttatcgtcggtaaagtatggggtgccgcaggccggaatccgggtatatgaggtgcgagattcgttcgattttcgggggatgcgggattccggttgtctgccggattctgaaatttcaacagagaggagtatgtgttggcaaagggagagtatatgcggatctgaatcgtgttgtggaatgaattcggaaaaatttttataaggaatgccgacctgtgaaaaaccggtccgattcataatcggaccggtttttttgtcttcggagcaactcctgaaagatcaataggagtaatcctcgcagggaagttttccggtgtattcgatttcgagctcggtatttttgtcgtcctcgtcgatggctttgaacgagcccgtaatggtatagtcgtcattgccgttggcgacgattttgagagttccctccgtgattctgttcttgatgattccgtaggtgggatcgttgtagttccagaaggatttcgccagatcgaaagtcatgttctcaccggcggcaccgcccgtgtagtcgccgctggcgagttgcagaggatctgtgggcgcgagcgtaatgtagaacgtgatgccgtattcttttatcggagagccatctttcaggccgaggaagaatacattgtccccattgtagtagaggtcgccgacggtcatggttgctttcggtgcttccggagccggaggagtcgaatagttgttgaaaggtactgtgccggtaaaatcgatcttaatggctgtttcctgtccggtgtcgctcgctccccggagagtgccggttacggtgtagttgtggttcccgttgtttgtcacggtgagtgaaccttctttgatcgtatttttgatccggtcgttgaaattctccttgtcgatgaatgtccaagaggatttggctgcgtcgagggtcatctctccgctgccggtcgatacggggtagtcgccgctgacgagctgcagggtctccgaagcgggtagtttgaacgaaagcgacgcttcgtaagtatctgtcgggttggcgtccttgagggtcagagtatagatattgccgtcgtagtagtccaggttgccgatggtcatggtcacctccgcaacagtcggttccacgggttccggatcggcgtagtcctcgaaaggaagagtgccggaaaagttgattttcagagctgtgtttttaccggttttatcggatgtaccttccagtgtgccggtgatcgtgtagttgtggtcgccgttgctgacgatgtgaattttggttccctccttgagccggtttttgatcttgtcgttgtggttgtccttgtcggtaaagttccagaatgacttgctcgcatcgatggtcatctcttcgcctgtcgttgctgccatatagtcgccgctggccaacaacggtgaatccgaagcgggcagcttcaagtaaaaggttgtctcgtagagatcggcgggattggcatccttgagctggagataatagatgttgtcgttgtaacgatacagggagccggtggacatggttacctcaggcacttcgggtgcgggatcatccggagtatccggatcatccgggtcttcatagtcttccgagtaatcggaaatcagcaaccgacctgtgaatgcgaacgctacgcccgcttcgttttccataatggaacccccgtcctgaatggagccgcctttcatgtggcctctgatcgtgtaggtcatgttgtcgccgatggcgacttcgaattctccggcttcggcaacgtattgtgtccatttgggggcgaccacattccagttggaacggtatctagtcgtatttttattgttgaacgtatttatttcccaagtggaggaggcggtgtatttcccggccggaagggtgaagctacccttttcctgtcgtgggacattgacataaaagcatacgctacatccgcgggcagagttgttcaggtctttcaggtagaggaaataaacggctccgccttctttgctgtattcactgtcatgcccgtagtacatcagttcgccttcggtcatcgtatgggcgatgtacccggtcatgggcggattgggatcgtccggaatttggggtccctgtgggtcgtccgggtcgttcggctccgtctgctccataccgttgtctttgtcgctgcatgaaggcaggcatcccaaaatcccccccccgaacatcagcaacatccatgcgaatctaaagtgtttcatagcgtaaaaggttttagtgccgggcctacggcaggtttttaattttcggcagaaacgaggccggtcttaaaaaaaagcgctttctgcttaagtgttttctttcatgtaatagagatgttgtttttctttgttggaaaaaaatagataaaatattcggtatttgcaaatgtttttgtcttttttaatttattgtgtgtttttattggttgaaaaattgggactatctcgttcgacgaagtttgaaacgatatttttaagtgaggagacggtcgagatagtcgtctgtcggttgttaagaagatcagtccggactgaatgtccggactgatcgggaatttttcgtatggagccggtctgatgcttttctcctgaatggtagttttcaggagaggcgtagcgatcggtgtaatttcgacggttgccgtcgtcaatgttgtatggatgtgtcgtttgtcgtaatagggatgaatacgatgtccgaacagcgcagggcttcgtcatcgacggcaaaggcataaatgtagtatttggagttcggttcgagcgtttcctggatttctctggattgttgaaaggtatattggctcaggatcatttcggccgtgtagcccatccatccgtagatctgtacgttgtcgatccaactttccgatattttctccaaaacggtcgcatccgtatcggccgcatcgacgctgccgtagatctttgcgacaaaatggccgtcgtaatcgttcgctttgacaagaacgtcgatgttgagaccttcggtcgaaacgatctgtatgtcgaattttgtgtcgattgtttggggtgccagggttgtgagcgtcttttttgagatcggggtcagcctttcgatcgtgatgggatccacgccgtatgcgtaaacgaggtattcggtattgggttccatgttttcgatcagcctgtctgcaatagtcccctgttcgaggtattcttgtgcccagctttgccagccgctgcccgttgcgtccatgtctgtatagaagtcgatgtcgtattggtagagctcgtcatccgtcttgaaatcggcggcagcccgggaggggatgatgttcaacagataatacatttcctggtctccgggacggactgtagttcggaatgtttttgtggtgatgtccgaaatcgttatcgtaaatgcctcctccggacgggccgcctgttttgctgtaaaggaaggcgccggctggatatccgcgtacgaaacttcgatgattgcttctctcttttccgctgtttcgtttttggttacgttgaaagagatgacccctgcggttttggtatcgatgtccgttatccaactgtcgttgcatttggcagacagggtcgcatttgcgacggggttttcgatcgtgtattcgatttggaaaggtcctccttcggccggaacatcgaggctctctttggcgaatacgatttcaggctgtgcattcggaaaggtctgtttcactttgaaagaaggcgccggctggatatccgcgtacgaaacttcgatgattgcttctctcttttccgctgtttcgtttttggttacgttgaaggagatgacccctgaggttttggtatcgatgtccgttatccaactgtcgttgcatttggcagacagggtcgcatttgcgacggggttttcgatcgtgtattcgatttggaaaggtcctccttcggccggaacatcgaggctctctttggcgaatacgatttcaggctgtgcatccggtgtgacgggatcgtcgttgttacacccggcaaagagcgaggaacccaaaatccccccccgaagatcatcaacaaccatacgaatctaaaatatttcatagtataaaaggttttagtgccgggcctacggcgggtttttattttcggcagaaacgaggccggtcttaaaaaagcgattctgtccgggagttttttgtgtgtgaagagaaatgtgtttttatctatctgaaaaatagataaaatattttgtatttgcaaatgatttttatttttgatttgcagggtgcttcatattttattcggggtttatgcggtatcaggtcgggagcgtgttgctccgaacgatggcggaactgcaaactttgtcttcgtttttactgtttttgtgggaaaaatgttaattttgtggctcggaagatattgcttgttatggaatcgaaattgaccctttacaacacgctcgaccgccgcaaggaaaccttcgagccgatcaatcccccgcatgtgggaatgtatgtctgcggacctaccgtatatggcgatccgcatctgggacacgcccggccggcggtgaccttcgacctgttgttccgttatctccggtcgctcggctacaaagtgcgctacgtgcgcaacgtgaccgacgtgggacatctggagcacgatgccgatgacggtgaggacaagatttcgaagaaggcgcggctggagcagctcgaaccgatggaagtggcgcactattacacggagcgttaccaccgggcgatggacgagctgaacgtgctgtccccctcgatcgaaccctgcgccagcggccatatcatcgagcagatcgccatggtgaaggagattctcgacaacggtttcgcctacgaatcgaacgggtcggtctatttcgatgtggagaaatacaaccggaaatacagctacggccgtctttcgggccgcaacctcgacgatattctgacgaacacgcgcgagctggacgggcagggcgataagcgccattcgtgcgatttcgccctctggaagaaggcttcgccggagcatatcatgcgctggccttcgccctggagcgacggcttccccggctggcacatggagtgttcggccatgagcaccaaatacctgggccagcggttcgacatccacggcggcggtatggacctgatgtttccgcatcacgaatgcgagatcgcgcaatcgacggcggcgctcggccacgactcggctaagtattggattcacaacaacatgattacgatcaacggtcagaagatgggcaagtcgctcggcaacttcatcacgctcgaggagcttttcacgggcaatcataagttgctgacgcaggcttattcgccgatgacgatccgtttcttcgtattacaggcccactaccgttcgacgctcgacttttcgaacgaggcgttgcaagccgccgaaaagggactcgaccgcctgatgaaggctgtcgaggcgctcgacaagatcaagccgtcggagcaatccacggtggatcctgcggagctcgaaacccgctgccgcgaagcgttggacgatgacctgaactcgccgatggcgatttccgcactgttcgattgggtgcgcatcatcaatcagttggtcgaggggcagcagcggatcacggcggccgacctggagaagctccgggagatcgtccgtcgttatgtgttcgatattctgggtttgcgcgacgaaaaggcggcttcggccggcggcaaggatctggtcacgccgttggtgaatatgcttctcgacctgcggcaggcggccaagaccgagaagaattgggcgctgtcggataagatccgggacgagcttacggccatcggtatccgggtcaaggaccgcaaggacggctgcgactgggagatcgaatagcgtttcgtcgttttaattaaagtattgataaatcgatcgttcctgttcggtgtattccggacgggaacggtgtgtttggatcgtgcgggcggttgccggggcggaaagtccgtcgcagccgtttcgtgcgtcgaatgattattgaagggaggacttgtgtatgagtgaagtaaaaggagcggcgatggagctgggaaccgagcgtatccgcaagctgctcgttcaatatgccgtgccggccattatcgcgatgaccgcctcgtcgctgtacaacatggtggacagcatctttatcgggcacggcgtgggggcgctggccatttcggggctggccctgacgttcccgctgatgaacctcgcggcggcgttcggttcgttggtgggtgtgggcgccgcgacgctggtgtcgatgcgcctggggcagcgggattacgaaacggcccagcggattctggggaatgtcgtggtgctcaacctgattatcggaatctctttcgggttgctgacgctggtttttctcgatccgattctctactttttcggagccagcgatgcgacgatcggctatgcccgggagtatatgtccgtcattctgtggggcaacgtcgttacacacatgtatttgggtctgaacgccgtgttgcgtgccgccgggcacccgcgcaaggcgatgtacgccacgatcctgacggtgacgatcaatgcgattctcgacccgctgttcatcttcggcttcggctggggcattcgcggcgcggccattgcgaccgtgctggcgcagatactcgcgctcgtctggcagttccgcatcttttcggacaggaacgagctgctgcatttccggcgcggcatctaccggctgaaaggcaagatcgtgcgtaatgtgctggctatcggcatgtcgcctttcttgatgaaccttgcggcttgtttcatcgtgattctgatcaacaaggggctcaaggagtacggcggcgatctcaatatcggtgcttacggtatcgtcaatcggttgggattcttcttcgtgatgatcgtcatgggcatcaatcagggtatgcagcccattgcggggtataattacggtgcccggcagttcgaccgggtggaccgggtgctgaaattgacgatcatcggcgctacctgcgtcaccacgctcggattcctgatcggcgaattggcgccgcgcctggcggtatcggttttcacggacgatccggagttggtccgtctttcggccgagggtatgcgcatcgtcttcttctgcttcccgatcatcggtttccagatggtgacgaccaactttttccagagtatcggcatggcgggcaaggcgatcttcctttcgttgtcgcggcagttgcttttcctgatgccggggctgattttcctgccccgcatcttcgacgagctgacgccctgggacggcagttggggcgtatggtgttcgatgccgctgtcggatttcctggcttcgctggttgccggtgtcatgctgttctaccaattccggaagttcaaggccaaggccgctgcggggagaggcgagatttcgggagccgaagtcgaaaacgatcgcagagtgaatgaataaaaaccgttgcactatggaacaggataagttcgttatcaatataggccgtcagctcggcagcggcggcaaagccgtcggcgaggcgctggggcgtcgtctgggcgtacacgtctatgacaagcagttgatcaatctggcggccgagcagagcggcctctgcacggagcttttcgagcaggccgacgagaagaagtcgaggagcctcttttcctcgctgatcggttatctgcgcatgccttttgcaagtgaagaggggagtgtgaccgatgtgctgagcagcgaggcgctgttcaagatacagagcgacgtgatccgcgacatcgcctcgcgggaatcgtgtattttcgtgggccgctgtgccgactatatcctgcgggatcatccccgcgcggtgaatgttttcgttacgggggctccggaagatcgggtgcgccgcctttgcgagcaggagaatgtaacgcccgaagaggccgaagcgcagatggagcgtacggatgcccgcagggcttcctattacgactatttcagcagcggcaagtggggcgaagccgcaacctaccatctctgcatcgattcctcggtgctggggatcgaaggtacggccgactttatccgggagttcgcggagcgtaaactgaagatgaacctgtccgggcggtagtcggcggcttcgagcgtgttcggcataatccaaggatgcgtcggacggttttgggaagggatgaaggaaacggttttcggacggtcagtgccggtgtgatggagcctgttttcgatcggtgggttgtgataacgttcggtagcccgttgcccgaggcgatcttttcggtggaagggtttgggcgtccgacttttttcggccaggagctgccagggcgggatcgtttttattggcaacgagcccggttcctatttccgaaacccggaaattttatttacatttgttggaaaaaacaggcgggacggtgattcttgcggaagagcctgcacgattccggcctgtaaaaattaatcggaaaatatggtacttgcagaacagattaaagaggctataagacgtcaggatacgttggggaggtgtctttgacatcgaccagcgaagaatagaactccagaacgaggaggagaagacgcaggttccgggcttttgggataatcccgacaaggcccgcgaacagttgcgccgcgtggcgggaatcaaggcgtgggtcgaggagtacgatgctgtggtcaaggaggtcgaggacctgcggttgatgccggaattcgtcaaggagggcgtggtgaccgagcaggagctcgacgagcagtatgcgcgtgcgatgcaccgcatcgaagaactcgaattgcgcaacatgttgcgccgcgacgaggaccgtatgggcgctatcatggacatcaattccggtgcgggcggcacggaagcactcgattgggcagggatgctgctgcgcatgtacacccgctggggcgaggcgcacggatacaaggtcaaggtgctcgactatcaggctggcgaggaggtaggtgtaaagtcctgcacgctcgaattcgagggcgaatacgcctacggctacctcaagagcgaaaacggcgtgcaccgcatggtgcgcctgtcgccgttcaacgccaataacaagcggcagacgactttcgcgtcggtgttcgtgtcgccggcgatcgacgatacgatcgaaatcacggtcaatcctgcggacatcgagtgggacaccttccggtcgagcggtgcgggcggccagaacgtcaataaggtcgaaacggcggtccggttgcgctatcacggcaaggatgccgatacgggcgagccgatcgagtatctgatcgagaatatggagacccgctcgcagttgatgaaccgcgaaaatgccatgcgcatcctcaagtcgaaactctaccagcgggagctggacaagcgcatggctacgcagcaggcgctcgaagctacgaaaaaacgcatcgaatggggttcgcagatccgctcctacgtcttcgacgaccgacgggtgaaggatcaccgcacgggagtccagacctcggatgtcgagggggtgatggacggcgacctggacgaattcatcaaggcctacctgatggagttcggcggacaggcgtaaaacggctgtgtttatagcaatcgaagcggcgaaccggaagtttccggttcgccgcttcgattatctggcggatggatcattctgtccatgtgtaaggacgttctttcattattttccaacttccgccgtgtttgtgtagagatagctctcctccctgatgccagtggtccgttacgatgaatgctctgtcaagggaacgattgaatacgataagccgcagaccgggtggcgtattgaggttgatataatcggtgccgtattccaagggaactatcggaagcagaaattcccgccgtttgctgcgttcgccgggagaaatgacaggagtgaaatatccctctttatccataccccaacctaaaaaagagagtaaggcagctctataggcttgattcggatagagtgtttttagatcggggtctttaagttcgggacggaaattggagatcgtgctgtacggtttgtcggctgaagcgtgcgttatttcgatccaatcgggatattgacagttctctatcttgttgaggaaagagctgtctcccatgacgtaaaagcggatattcgactgaatgatggcgtaacggtaagtcgtatcggacccggatggggttcgcaacagcggggtgaaatagtcgtgaaatagatcatatactgcctttacggtatcgttgagtgctttcgcatcatccgcgttgggccgatatgcccgatgccagcgttcgaagaattgggccgcttgcgtgcgggaccgagctttgtaggcttgcatcaattggttcgaaagtacggccgtagccttcgacagatcggcgtcgtaacttgtgaaacgaggtcgttccggctctttgtagcagagggaaagcaagatcagagcaatgacgatcacaagtcctgccatgagggcagggaatgcggtggatgcgaaataagagaacgggaaacgcttcatgatgaggaagggggatgatttcgaacaaagatagagaaattttctatctttacagaagataggatgcgcctcggaaaactgagaacaagttcctgttttctctcggctttcactatctttgttcgtatgaagcgaccggtatttttacttttgttcgggatttggatgtcgtccgctttggggcagaaagagcaatcgatcgtggtgtcggataagctgcagacgttacgctgcggagatcttattgtgcccgtacgggtcggtacgaccgatacggcgatgtattatccccggctcgcagggaagcgtgtgacactacttgcgaatcatacttcgatgatcggcgaacggcatttgatcgatattcttcacgcgaggggattcgatgtgactgcaatcttcgctccggagcacggattccggggaacggccgatcccggagaacacatgggaggttccgtcgatgcggcgacgggtattccgatccggtcgctctgcgacgggaacacgcggaggccttccgacgaggcgatgcactcgttcgaggtggcgtgaacaggttggatgcgggcgtgttatacctaaattatatagagcgattggatgcctgcgtaggtttcgagcgggaagccattggtccggatcggcccaatctcaacagaatgctcatcgacggaccgattctcgaagaacgatacgaggcgggggggaatatgtgtgccggatgattgtcgagggatatgctgcggaggagatccgcaaccggtggcgggaggatatcgggttgtcccgtattcaaagaaagccatctcttttatacgaagagcgacctttattccgttctattcgtgaataaagtctgcgagtatgccggaatcgctcgcaaagcggaggaaatgttgtttttttatccgatttttcaggccgattcgaaataaattcgtatatttgcaaccatgtcctttgagtaaattgaggtgcaggaacgaagaaatttccataaacaaacctaataattttttaatgcgtatgaaaatcaaaacatttatgtttgctgctttggcagcatttgcgaccttgttcgctggttgtagcgacgacgaaaacaaaaccaccggtggcggtggcaataacggaacgggaggagattctgtcgagatcgaatataaggtgacgttctccgacacgtcttattacagttcggttgctacgttcgaggcgattacagagaatgccaagtcccagtcttttatggctgtggtgtttgagacggcgttcctgaagcagcaaattcccggaattacggataatgatattgcgaaaggtgtcatcaactattataaggcggaatatatgtcgcagggagccactgttgctgatatttacaatgagattactctgcaggggcagttgcatggtagtgtaactcctttggagttggatgtccccggtttgtcggcgggtacatcctactcggttgtcgttgccggtatcaacgagaaccttgaaattgtcgctaacggaatcgttgccgagtttacgacgaagacattgcccggcctggaggaggagaattgtactttcgaatggacggttgagcctaaatcgacgtctgtaacaatgagttttactccttccgataagaaggtgccctatttcttctatgcgctgacagctgaagagtatagttcggaatgtcaaaacgaccccgcgatactgaaagagctgctcccttcttttatcgctaacttggccaaggcttaccagatgtctgtttccgagtttatgaagaaacagcggatgacgggtgatttggaggagtccacttttactggtttgctgcctaaaacggggtatgtcgtattcgtgtgcggtatggatgagtacggtcgtccgacgacggatgtcagcgtgaaggactttgaaacgttggaatatgtcgcttcggatgctacggtggagagcgtggatgtccgtctgtatgacggtgaggaggcttcgtccattgatccgactacgtataagcccgatgattacggaggtgcctatttcttgcgatacgtaccccagttctccgaagagtgtgccgaggtttggaatatgctggtgatcgatgtggatttttcgggtgagtctgacgacgtggttttgtcttacattatgagtatgggctttgatgcagatacttctatgatggatatagtcaagcttcctgagggccttatggtttacgcttatatcgtagcacagaacgaggccggagagtatggtaatatttaccgatgtgaaccgttcgaggtgagcaaggctaacctcagtccggtggaggaacttttccccgagactatgtcgaagagcggaatttcttccgtagctttcagctcggtgggcaagatgtgtccgaagaccgtaaattcgatgaaaatcgttagcgtgttgtaattcggccgctgaccgaaaccgaagattcccgaagtaatttcgggaatctttttttgcgtctttcggaaccggggaggagcagctggaggaaattccgggaattgagtccgaaatatttggcactttgtggaaaagtatttaatttagtaaaaaatatcgcaatgatatactttggtggatctctttgggaatgtagcgccaagtccctccgaggagggaatgtaggggagaattgcattacagacgcagccacaagctgcgaataggcgacccttgcgatgctgcgatctcggatgatggtacattgaaatatataattgcccaaaatgtttattgcaatgagtgtatctgtgaacaagacatattcggcggccgatttgaaattcctcaatttgctttcggagaaattcccgaccattgccgacgctacgactgaaatcatcaacctggaggctattctgaaccttcccaaaggtaccgagcacttccttacggaccttcacggtgaatacgaggctttccgccacgtgctgaagaacgcttcgggcgtgatccggcaaaaggtgcacgaggttttcaacaatactttgcgcgaatccgaaatgacggagctttgtacgctgatctactatcccgccgagaagctgcagctcatcaagcagaaggaatcgaatctggacgactggtataaggttacgcttaaccagctgacggaggtctgccgggccgtttcggtcaaatacacccgctcgaaggtgcgcaagatgctgcctccggatttttcctatgtcattcaggagcttctccacgaatccgattcgccgggatcgcccaagcagagttatttcaacgggattctcaattcgatcatctcgatcggacgggcggatgctttcattatcgccatgagcaatgtgatccagtgcctgacgatcgaccgtctgcatatcatcggcgatattttcgatcgggggcccggtccgcacttcattttcgatacgctggcccagtacaagatgtacgatatccagtggggcaatcacgacattctttggatgggcgctgcggcggggaatttagcttcgatcgccaatgtgatccgtgtgtcggcccgctatgacaatctcgacgtgttggaggacggctacggcatcaatctgctgccgctggcccgcttcgccatggaagtttatgagaactcaccctgcaagccctaccagcccaaagtgatgcagaattcgggcgttacggagcgcgatgtactgctgatggcccagatgcacaaggcgatttcggtgatccagttcaagatcgagggacagatgatcaagcgccatcccgaatacaagatggaggggcgggctttgttggagaaaatcgactacgagaagggaaccatcgagatcgacggcaaggattaccccttgaaggacgccgactttccgacggtcgatccccgggatccttataagctgactccgggcgaagatcagcttattcgtacgttgcaagcctcgttcctgaacagcgacaaactacagaaacatatccggctgctcttttcgaagggcagtatgtacctgatcgtcaattcgaacctgatgtaccacgcttcgattccgatgaccgacgaaggggagttcaaaacagtcatcgtggacggaaaaccctatgccggacggagcctgctggacaaactggaccgcctgacccgggaggcctatttcggtggcaacggggccaagagtcagcagatggcgctcgattacatgtggtacttgtggtgcggccccgaatccccgttcttcgacaaggccaagatggcaacgctggagcgttacctgatcgaggacaagaagacgcaccacgaggagaagggagcttattacaagcatttggatgatacgaagatgtgcagtatgattctttcggctttcggactcgatcccgagaaatcccatatcatttcgggacacgtgcccgtgaagacctgcaagggcgaaagtcccatcaaggccggcggcaagctgctgatgatcgacggcggattttccaaggcgtaccattccgaaacgggcatcgccggttacacgttgatttacaattcgcacgggctgcaactggtgcagcacgagcctttcgagtcggcggtcaaggccgtcgaggagggacaggacatcatttctacgaaggtgatcgtcgaggcgacgaccgatcggatcacagtgcgcgatacgactatcggcaaggagttgcaggtgcagatcgacgacctgaagaacctgctggcggcttatcgcagcggccagatcaaggaacggaagtgaccgaaggcagcgttgctgcgaaatatccgtgtccgggggactccttttatccggtcggaattctgcgaaagacgactttcgaaggagcgaatcggtcttttcggttcggcagtaaggcgggggataaaagcgggccgcagctattacgctgcggcccgcttctacgatatagacgaaattgaaaatcattcccattctatcggctcaccgctccagcgatcccaatctttccaccgctcggtggtcgcacggacggcttcttcatagtcctcattggtgatatgaatcgtccatcgcacggcacgggggcggtccgggaactcttcatactcccaacgggccgggtcgcgcggcgttccgaccatctcttccgtcataggctttataaaattataaagcatcgcggtatctttctccggacctaaagtcccggccttatcgtctcgatagtaaatttcaacagcagtcagtcccttgttcaagtccttgattaatacctgatccatatcgaaattcaaacccgcgcaattttccgtacatctccaatgcgtagcttgttctttcggcttgaggtagtagaagaatccgtatggattcatccgtgctcttactgcaatgtacagcggctggtcgctggcgtttcgcatacggaagtacgtgtaatagagactgggttcctcgtcctttatgttatcctccatcgaatgatacatctccttatactcctcagaaggctgtacaggctgctcttccggcggagtttccggtgccggactttccgctttgtcggaacagcccaatggagccaagaacaggagcaaggctcctaacgataaatagacacgcgctttcataatcaggtaggttttaggttgaacgatcgtcgcctgcaacagtatgccttcgatccttttccacgcgcctcttccggaatgcttgcggccattgtgccgcgagcttcccctttcacgggctgaaacaggcattagacattgcgggctacgcttcttccgcgatgtttctgtgctctaaattaagtataatagatagattctgcaaacggaaaggttcgtttgcggaaaaatccctgcacacgtgtctttcgatgtcctgccacagccccgctaccgtccgatgtgtttcgatctttccgcgaaatccctttcgagggtgcttcggggcgtatcgaattaacggtcggcggaatcgtgatctgccgttgaaataggctggaaaactgttgtgaatccctgaccggcggcaggccgtatgggtggatcggccccgggtttcgggtgtgtcggcagatccatttgggaatagacaataaaaaagctcttcctttcgagggaagagcttttttatgccttcttgtaaaattattcgggcttgatcgcttcgctcgggcaaacgcctgcgcaggtgccgcagtcgatgcacttgtcaggatcgattacataaacatcaccggccgagattgcctctaccggacattcgtcgatacatgtgccgcaagctacgcacaaatcgggactaattttgtaagccatttttttgtattgtttaagttgtgtgttgacggtgcaaatataaaaatttatttaatcatatcaaagcccgtataaggaattaacgcttcgggaatccggatgccgtcgggcgtctggttgttctccagcagggccgccacgatgcggggcagggccagcgaggagccgttgagcgtgtgtgccagccgcgtctttttgtcggcatccttgtagcggagtttcaggcggttggcctggaacgactcgaaattcgacacggacgacacttcgagccagcgtttctgcgcttcggaatatacctcgaaatcgtaagtcagcgccgaggtgaaggacatgtcgccgccgcagagtcggaggatgcggtagggcagctccagtgccttgacgatgctttcgacgtgggccaccatgccgtccagcgcctcgtaactcttctcgggcaggctcaactgtacgatctccaccttgtcgaactggtgcagacggttcagtccgcgcacatccttgccgtacgacccggcttcgcggcggaaacagggggtgtaggcggtcatcttcaccggaaaatccttctcgtcgagaatcacgtcgcggtagatgttcgtcacgggcacttcggccgtcggaacgaggtagaagttgtccgccgtggcatggtacatctgtccctccttgtcgggcagttgtcccgtgccgaagccggaggcttcattgaccatgaccggaggctccacttccagatacccggcccgcgtgttgcagtcgaggaagaagttgatgagcgcacgctgcaaccgggcgccctgtcccttataaacggggaaccccgcgccggtgagctttacgcccaggtcgaagtcgatgatgtcgtatttgcgggccagctcccagtggggcagcgggttttcgggcaattgcgtatagctttcgaccagtttcacgaccagattgtcttccgccgttttgccttcgggcacgatgtcggccgggaagttcggcagggtgacgatcgcggcctgaagagcatccgaaacctctttgaattcggcattcagcgcgttcgaccgctccttgagggacgcgacttccgcttttttggcttcggcttcgtcgcgccgtccctgacccatcaatgcaccgatttgtttggccgcctggttctgtgtggccagacattcgtccagttcatgctggatcgccttgcggcggtcgtccagtttttcgatttcggcgattaccggagcggcgtccactcctttttttgccagacggcggatggccgcctcgcggtcgtccctgagttgcttgatcgtaagcatggtcttgaaatattacgtgttcggagagcaaaattacaaaacaaaccccaatcgcaagcacatttgccgattattttttacttttgccccgagataagacacgcctcgacgcggcccgggggaaccggatgtcgtttcgggttttttcttcggcatattttccgacaaagcaccgtgaaatccatcgaattacttgctcccgccaaagatttgcaggcggccgtcgctgcggtcgattacggcgccgacgccctctatatcggaggcgcccgcttcggtgcgcgccacgcggcgggcaattcggccgaggagatcgcccgggcggtagagtatgcccatcaatacggtgtacgggtgcatgctacgctcaatacgttgctctatgacggcgaattggccgaagccgagcggcaggccagggagctgatcgccgctggggtggacgccctgatcgtgcaggacatggcgctgcggcggatgaatctgccggtcgagttgcacgcttcgacacaggcggccacacgcacgccggagcaggcgctttttctggagcgctgcggctttgcccgcgtgattctggagcgggccttgtcgttcgacgagatccgtgcgatccgcgccgcctgcgggggcgatctggagtgtttcgtccacggggcgatctgcgtggggtacagcggccgctgtttcctgtcgcgttcgatgagcgaacgcagcggtaaccggggcgcttgcagccagccctgccgcctgacctacgatctggtggacgagtccgggcgtacggtcgtcaaggggcggcatttgttgtcggtgcgggatttgaatttgtcggaccgtataggcgagctgatcgatgcggggattacctcgttcaagatcgaaggacgcctgaaggatgtcggatatattaaaaatgtcgtgagccattaccgccagcggatcgatcgggagctcgcgtcacggccgggattctgccgctcgtcggtgggagagagccggccggactttcagccggatccttcgaagagtttcacgcggggcgagtcggagtatttcttcgacggtcgccgggcgggagtcgcatcgttcgacacgcccaaagctgtcggcgagttcgtgggccgggtagcccgggtcgatggccggagtttcacgttggccgagccacacgacctggcgcctggggacggcatctgtttccggacccgaaacgggttggcgggtaccaatgtcaatgaggtcgccggaaatcggatcgtgcccaaccggatggagggtgtcgtccccggggcggaggtgttccgcaatttcgaccgccgcttttcgttggccctcgaccgcagccgtacgcggcgcgtgattcccgtgcgtgccgacgcggcgataacgccgcagcgagtaacggtgcgttttaccgattgcgagggggttgcggccgaggttacgcgcgacggggtgttcgaaccggcgaaagattcccggaagatgttggaaaccgtcgccgcacaactttcccgcagcggagatacgattttcgacgtgcgggaggttcgctccgaagggtgcgaccgtttcgtgccggtgtcgttgctggcggagctgcgccgcgaaggattggagcgtttgcggcgggcgcggctcgaccgccctgtcgtccatgcgattttgcccgaggatcggtcggcgccctatccgtcgaaagtccttgcggccgaggagaatgttacgaatcgtctggccgaggagttttaccgcgatcacggggtgcggcaaattgcacgcggactcgatttggaacctgcgacggcagggcatccggtcatgcgttcggcctattgcattcggcgtgagatcgggcagtgcctgaaggagcatccgacgctgaaaggagagctgtttctggtgcgcggccggttccgataccggctccggttcgactgtgcccggtgcgagatgagcctgatcgacgagagcgatcgaaaataacaaaagggtcccgtgcttccgattggccggaacggtcttgtttcttcggcggtggaagttgcgggcgagttccgtttctgctggggcggcttggtgaaatttgcttggcccacacctgttcgctgcaggccggtaaaagaaggatgtcggcagtatgccgtgcacgggaccggaaaattcgttatatgatgtatgataaaagataattccatgtttgaaaccctgattccccgatttcccgattatgaatttatcgactccggcgatttcgagaaactcgaacgcttcggccgttatgtcgtgcgccggcctgagccgcaggccatttggcggcggagtcttacggagcaggagtggcgccgcctggccgacgcctcgttcctgcgcgacggacgcagcgaagaacgcggggagtggcggttgcggtccgggatgccgtcccggtggacggtggactacgcctacgaagggatgcggctgcgcatgcgcttgggcctcacttcgttcaaacacgtggggctttttccggagcaggcggccaactggaatttcatctacgacaactgtgtgcggatgagagcggaggaacggacgccgaaggtcctgaatctctttgcctatacgggcggagcgacgctcgcggcccgggctgcgggagccgatacgacccacgtggattcggtcaaacaggtcgtgacctgggcgcgggagaatatggagcagagcggcttggagggggtgcgctggatcgtcgaagacgcgctcaaattcgtgcagcgcgaggtgcggcgaggtaatcgctacaacggaattatcctcgatcctccggcttacggacggggtgccaacggcgaaaagtggattctggaggataacatcggcgagatgctcgaatgttgtgcccggttgctggagccgtgcggagcgttcctggtgttgaacctctattcgatggggctgtcggcaacgctcgcttcgaccgccgtgcggcaggccttcggcacgccgtttgaagaacaattcggagaactctgcttcgacgaccgggccggcaagcggcttcccctggggacgtactgtcgttttgccaggtagccgacgatcgggttgccggcacggggcagagcggtttgaaaaacttatgaaattatgactacgctctctattgtgctgggtatcctgacctggtgtcttatttccgtgctgatcgggctcgtcggcagccgccgcaagatcggattcgcctggacgttcgttttaagtctgatccttacgccgatcgtgggtcttatcgcggctctgacctcgccgaaactgccgcacggaggcgagaaatggggcttcgtgcacatcggattcatggtgcttacggcattggctctgatctcttttctggtggtgctctttacgggcggcatcttcttcgtcgccggaggagagtaagcggttaaagataaattgcgatgcctgcggcagccgagaggacgatcatcaggatcggattgagcttgaagtaggagcctgcgagtacgccgccgaagagaatccaactccaaaagtcgatgaagctggcgtcgcctgcgtcctgcggaaacatcagcaggagtgcggccgccccgatcatgccgatcactaccgggcggagtccccgcatggcaccgcttaccagcggattgcccttgagtcgggtgatgtagcgggcgaccagaatcatcagcgtcatcgacggcaggcagaccgcgaaggtcgcgatgaccgagcccaggataccgtaccatatgctgccgctttgcatcccgactgtgtaacccacgtaagtcgccgaattgatggcgatggggccgggcgtgatctgcgatacggccacgatgtcggcgaattcggcgttggtcatccaggcgtgctggacgaccacttcgttttggatcagcgacagcatggcgtaaccgccgccgaagccgaagaatccgattttcagatagctgacgaacagttcccagaatatcattgcttactcttttttgcgatagacaattcccaggcgatgcctgcgcctgcacctacggcaagaatcagtaccggtgaaagtcccagccaccagatcagtccggccagtgcggcggccagtacgatcatgctccagtgcatgccccgcgtgagggtgaccagcggggcgatgatcagggcgacgaccgccgggcgcattcccttgaaggctgcatcgacgacggggttctggcggatgcctgcgaagaagagggcgatcgccaggatgatgaggaacgacggcagcacggcacccagcagcgatgcgcaggcaccccggagccccgagcgtttgtatccgacgaagacggccgtgttgatcgcaatagggccggggaccgattgtgccagggtcagcaggtcgagaaattccgaagcggggatccacttgcggtggtcgatcacctcgcgttggatcagcgggatcatggcgtagccgcctccgaaggtgaagagtccgattttgaaaaacgaccagaatatttcccaaagttgtttcattgtaccggttttgaagacggttgtctgtcgtccgttccgatttcggattcgttggcggcagccaccaatgcggtcgccatgacggcggccgtttccgtgcgcaggcgctgcgagccgagcgtgatttcgcggaaacctccccggacggccaggtcgatctcttcgggcgagaagtccccttccggcccgatcagaaccagtacgtcgcctcctttgtgcaggatgtggggcagaaatgccttgcccagggccgaacggggagcgtcgcagtgggcgatgaatttctgtccgtcgaagggctgcttgatgacctgtcgcagcggagttatttcgtgcaggcgggggtggtaggctttgagcgactgtttcacggcagccgtgatgaccttgttctcccgttcgggcttgagcgtgcgtcgctcgctatgctccgtggcgagggggatgatctccgcgaccccgatttccgtggctttttcgaggaaccattcgaaccggtcgttgtttttcgtcggggcgacggccatcgtcaggcggtagggcagcttgccgaattcgctgttggtgtcgcgcacccgcacccggcagcgtttgggattgtcgtccacgatttcacagcggtagaggttaccgcggccgtcggtgatgtgcagctcttcgccgcaggccatgcgaagcacgcggatgcagtgtttcgactcttcctcgctgagcgtatattccggaggaacgatatcgggggcgtaaaacagttgcattttttataaattgtttacctttgcaaaggtaaataaaatccaacgaaccgatgaagcgatattctttatttttaatttcattgattctgcttatgactacgggatgcaaccagcgcaaagaggtggcggagaatccattcttcgaggagtgggaaacgccctacggcgtgcctcctttcgaccggatccggcccgaacattttctgcctgccttccagcgggcgatgtcgatccaggaagccgagatcgacgccatcaaatccaacggcgatcagccctctttcgagaatgtcatcctggcttacgaccgctcgggcttgatgctggagcaggtggggctggttttcaacatgctctgttcggccgacgtgaacgatcagttattggcggcgaaagagcaggcgatgccgttgctggccgcccatcgggacaatattctgctcgacgaggtgcttttcgacaagatcaaagccgtttacgaccgtcgcggcagcttgggtctcgatgccgtgcagacgcgcctggtggagaagatttacggtaaattcgtgcgggccggagcgctgctcgatccgcagcagaaggagcggttgcgccaaattaacggcgaattggcgctgctgcccgtgaaattcggcaataatgttcttcgggcgacgaatgatttcgtgctgaaactgactgataaacagcttgacggacttcctgcaagcgtgcagggcatagcccgggagaaggctgcggagttgggattgaacgatgcgtgggtcgttacgctcgacgctcccagccggattccgtttctcacgtattctactcagcgcgacttgcgggagcagttgtacaaagcatatatcgaccgttgcaacgaaggcagcgagtacgataaccgctctctggtgaacgatttcgcccgcctgcgtaacgagaaagcccgcttgctgggctatccctcctatgcggcttatgtgacggccgatgagatggccggaacgcccgctgccgtttatgagttgttgaacgaagtgtggacgccggcgctcgatcgcgccaaggaagagatggccgagatgaatacgatgttgcagcgggatgtgccgggggcgacgttcgaaccctgggattggtggtattacgccgaaaaggtgcgcaaggacaaatatgcgctcgacgatgctacgctgcggccctatttttcgctcgaaaatgttcgggaaggcgctttttcgctggcgaaccggctttacgggattacgttccgtccgttggtcgcaccggtttaccacaaggattgctcggtatatgaggtgctcgacgtggacgggactcatttgggcgtgctctatttcgacttttttccgcgcagcggcaagagcagcggtgcgtggtgtaccgcgttccgcagccagcgctacgaaggcgacgaacgcatcgctcctgtggtcgccatcgtatgcaattttactccgccgaccaaattgacgccttcgctgcttacgctcgatgaggtccagaccctttttcatgagtttgggcacgggctgcatgcgcttttcgccgacgtgaaatatcggtcgctcggcagggtggagggcgatttcgtggagctcccttcgcagatcatggagaattgggcgaccgaacccgaagtgctgcgccactatgcgatcaattatacgacgggagaggtgattcccgaacgcttgatcaagcgcatccgcgaaagcggcaagttcaaccagggcttcattgtcaccgaactggtagctgccgctcttaccgatatggatattcacgctattacggagtacgaacctttcgatgtgaacgagttcgaagccgatgccgtgtacggtcgccggggattgatcccgcagatacagccccgctaccgctatccctatttcctgcatattttcgatgggggctatgcgtcgggatactatttctatatctgggcgcaggtcctcgacaaagacgctttccgggccttcgaacagaccggcgacgtattcgaccgtgcgaccgcccggaaattccggacgctgctttctcggggcggttcggcggacggtatgaccctctaccgggattttcgcggggccgatcctgataaacgggcgatgctcgtggcctgtggcctgatggaggagctgcccgaagaacctgccgacagccttgccgtgcccgtcgtgaccctcgaaccgaatgaaaagcctaaaatctaatttaaccgatgaaaaagattgttatgacatttttaaccgctttggcagccggatgcgcggaccatacgatgcccgttgcccagctgcctgaaattgatacgaacaaccccttgctcgcggagtggaatacgccgcacgaaaccccgccgttcgaccggatccgggtgtccgattacgaaccggcgttcgatgccgcgatcgctgtgtcgcgtgccgaaatcgacgcgatcgtaaacaatccagccaagccgaccttcaataatacgatcgtggcgctcgatcgtcagggccggctgctttcgcgggtcgaaggtatttttttcaacctgctcgaagcggatgctacgcccgagatgcagcaggtggccgagaacgtacagcccaaattgacggccctgtccaacgacatatcgctcaacccgcagctcttcgagcgtgtgaaggccgtctatgaacatccggggtggttcctttcgaaagaggacaagaaattgctggaggaaacctataacggtttcgtgcgcagcggtgcgaacctttccgatgaggacaaggagctgtaccgacaatattcgactgaactttcggagctttcgctccggttcagccgcaatgtgctggctgccacgaatgcctttacgatcaatatcacggatccggcgcaggtggccgagcttcccgatttcgtgcgggacggtatggccgccgaagccaaggcccgtggcgagcagggatggacggtgacgctccaggcaccgagttacattcctttcatggagtattcgaccaaccgggagctgaaggagaaactctggcgggcgaacagttccctctgtctgggcggtgagttcgacaatacggagaacatcgagcggatggtcaatctgcgtctgaagatcgccaacctgttggggtatccgacgtacgccgattacgtgctggccgatcggatggctgaaaacgcgcagacggtcaatgctttcctgggagaattgcttgcccggaccaaggagtatgccgtgaaggattacaatacgatcggggagtatgcccgctcgcagggtttcgaaggcgaggtcatgccctgggatatggcttattactcggagaagtatcgccatgagaaatacgaactcaacgaagagttggtgaaaccctacttgcagttggacagcgtgaagcggggggtattcctgctcgccaataagctctacggccttaatttcacgccgaatcccgaagtcccggtctatcatcccgaggtgacggcttacgacgtgaccgacaaggacggtcgcttcctggcggaactttacctcgacttcttcccccgggctaccaaacgcggcggggcttgggaaaccgagttccggagcgtttcaatcgtcgagggacacgaaacccgcccgctggtgtcgctggtgatgaacttcaccaagccgaccgatacgactccttcactgcttactttcagtgaattcgaaactttcctgcatgagttcggacacgcgctgcacgccattctttcggagggagagcacgagtcgatcagcggtacgcacgtatatcaggatttcgttgagctgccttcgcagatcatggagaattgggcgaccgagaaagagttcctcgacttgtgggccgtgaattacaagaccggagaaccgattcctgccgacctgattgccaagatcgtcgcagcggagaactatcaggcggcctatttcaacgtccgtcaggtcgcgtatgcgctcaacgacatggcatggcattcgatcgacaagccgttcgagggcgatgtcgaactgtttgaacggacggcgatggctccgtcgcagatcctgcctgtggttgatggagccgcgatgtcgccggctttcagtcatatttttgccggcggatatgctgcgggttactatgggtacaagtgggccgaggtacttgcggccgatgccttctcgctgttcaaggagaagggtattttcaatcccgaagtggcggaggctttccgccgcgagattctttcgaagggcggtcacgaacatccgatgacgctctatgtgaatttccggggccacaagcccgaaaccaaggccctgatcgaaaagatggggctcgagaagagttccgaaaagtaaaattattttggaagacgaaggagggcgctgaactttagttcagcgccctcctttcgttgtgtgaggcccgtacgatccgcaaaatcataggtgacacagccccaaattgcaactaacaaagtttcgaatccacagttgcacttgttgcagaaaatgtttgttttgaggaactttgcaccgttcataatggcaatggcgcccgaaagggcaggatgttttgcattttccgtctatatcgctatatttgcgatgacatattgaatacacggaaagtgtaagtttattctcgaaagtcgaacgtaggaaattccactttttagcagagaataggcggacatcttctcgcgtcgtatccacttgtggatataggcgtggggctgttgcttattttatgctataaggtttcctacgacctgactttctaaaataagttttcagcaccacgctttcctttttattatttatcgtcgaggtgcgggcgagaaaatattcaaaatattatggaatctaaattggtagagtatgcaagagcagttgtagaagatgctgttgatgtagatgctgatttttttcaaaaattcagagatgcaatgtcttttcgagcaattatgcagtcacaacatccttatattattggagttgctatttctgacattttgaaaaaacgtgttttttcgagacgatcaacttttctttttaattctgatgatattgttaaatcaatttctgttacaggtgagttgtgtggttacgcattctatgctttttcaaaagtaattgctttagaacgggatgagtttagtgatgtcgtgcgagatgctttattagctgcatccgggagtgaggcctttaatagagataaagcttcattgaatgaggaagttgctgctgctaaaaggctattaatactgttacgtgtttatgaggagtatttagctgcggttttgtttgattatagggatgaattaattcgaaggttagtagatgaagaggggaaaataattgtagaaagtagtattacccaggaagatattgataatatcatatacaataccttagatttgcgcagtaaacaggagatgagatagagttggtaattttgtagagaagaggttagctaaaagaaagggaggcagggagtgaaccaggtatcgataagaattcaagattcatttccatattaggactctttgtctttcttgaaccgagacctgaataagaatttaacctttcattgttaaggtagttaggataggttcaagttcctttctctcaatttgatggtcaaaaacaaaagtaatggacaatttttatttcatcggggttgacgtcagcaaaaagaaactggacttctgcgtactattcgagggtaaggttctgcgcgaagaacaggtaagcaaccaccagcaggctgtcgccagactgatcggcgagttgaagaacgatttggaaatggataacgaacagtttttaatctgtgccgaacatacggggcaatatactttccctctggtatgtgcttgcaagtcggtcgagtgcaaactttggttggagaacccgtcccagatcaaatattcatccggtatgcagcggggcaagaacgacaaggtggatgcaaagcgcatagccatttacgcttcacggttcggagataaggttaagtattacgaccgtcccaccgaggagatagagaggcttaaacagttggagagggagcgtgcgctttacgttaccgacctggctaaatacaaaggccagatgtacgatcagaaagattttatgccggcggcgctttatcgcaagaaaacaaagcggatgaaaggcttaatacaggaactacaagcggctatcgatgcgatcactgctgaaatggagaagatcataggctcaacggaagtgcttgcgcgccagatggaacttttaatgtcgatagacggtgtaggtaaagtggtagctctgaatgtgattatcgaaacagaagcgttctcccgcttcgacaatcccagaaagttctgctgtcacgcaggtgtcgctccgttctcatacacatccgggagcagccagcactccaaaaacaaggtctcgcatagggccaacaagaacataaagaaactgctacatatggcagccgtatcggtaactcatcgtaaagagggtgaactaaaggcctactatatgcggaaagtagaagaaggaaagaacaaaatgtcggtaatcaatgcgttacgtgctaaaatcgtggcccgtatgttcgccgtcatcaaaagaaatgaagtttatactcctatttactcttaaaaaacttgcaaaaaccataagaatatggaaattttttgctgtcattttattgataaagaaagtcgatatgccggagatatagaaatcggacgggatgaaaagatttataaaaaagtatatgactctatacctcgttcaaggatgatagaagagcgtttagctaaaaaaggacagcgattaattttgtgcttgaaaaatataattgaagaaaagcaggcttaatttaggattagttaataattaaatttatgaggaagagttttatgaaaacatttgttgatgcccaaaaagattacgatcaattggaaatttatcgaaaatggttgagagataacaatgtttcttttcaggaagatgaagacggggaagcgttgtatttttgttatcaaggaggtaattttatgattaaggtgcctaaaagtgacaggaactggttggggcttgttttcccgaatgtgtatgatgtggttgaagaaaaaagagagtacgtacttgaaatattgaataggataaatctggagagaaaaagcgtaaaggcttttttggtcaaaaatagtgtgtggttagttatagagatgtatattgactctacacctgtaattgctgactttttcgaaacgcttttagcgaatttacatgaaacacgattggtattatattctaaagtgaagtgagttgattataaagattattgtcgattataaaaagtaatgttacgattaatatattgtgcacttactttgggagtattgtcgatggccggatgccggagcgggcgtccggtcgtcggtacttccgatgcttgtgccgcagttcctgtaattcccgtagcaccggacagcgatatgctttccgctgcaattgcagatacggagaatgaagtttgtctggctgattcgggcgatccggaatcttcggagcgtcggcgactgtatcggcggagtgcggagccgacggattccgtttggataaatagattgaatggggtgatacctgccgggcaggatcgtgcgatccgtgtttatatcaaatacaatcaacctgtttgcgggtatgaggtgacggcgtgttggatgccgttcgatgcttatagtgaaaccggccagtgggtgatgaatttccgttccgtatccggcggccggaattttcagtatgccgatacggggaaatattccaatcctatgttgatggatattacgttcgcaaagaattttcaaggtcatcggaatggggatgtctattatttcgattacgtatctgcgactgatgctatcaatagagaatattatccgaactcaccgttgggatattatactgcttttcagtttttcgatgcggacttcgacggagaggatgagttgctggtgaacgatttcggaatggatcgacagggaaattcgtacacggttttcgatattacggcaaagggtctgtatcggaaagattatctgcctttcgcagagatcgataacgaaacggagttctatccggcggtcgggacgattgtcttgtatgcacatgacggggtgcacgatagcagttggtccacatttcggaagcgacaaaatcggaagcggcgaaaaactttgcttgtaccggatcggctggccgatgcgacaagcgggcggttgttgcaaaaatataacgaacagggggaggcggacttcgaacttgctgcgattcagcagacttttgcgatttgggaacaagacggccgtcaaaatggggattcgatttatgtttacgaagttactgacgaaagattggaactgatccggatgcaagagcgatacctcccggaatgtagaaatctataatcccatatcgttttctttcgaatacgaaccgaatgttcaggggtatcgtgtcgaagggcgattatttgcgttcgatactccacagggactgggaaaccgactcgaagggccgtgtcgtctgtcgttttacaacgaatcgaccggttgtcgatacgatattttttgtgaacattattgtgatgaaaattcaattcccgggtggtatgatgaaacaggggaatatctcttcaatccggaagtcggaaataccgaaggaacattgtgtttcgattacagtacattgcaaggtgaggatgatcgggggccgtttgtattcgaggatgtcgatttcgacggtaaggatgaaattctgattcgcagaacgagtccgttgcggaattccgtgcattattacgaagtttataaacctgtcggtgcagacagttgtgtcttgttgaattatccgccttttaacgggttttattgcgatcgttgcggttgggatgaggtgtctccggaaaagaatacgattacgaggtatcgttccgatcataaaatgcaggtattctggtttcatcgatgaatcggaatatccggattcaattatccgtatgccgtagatacggtccgagcagagcttttttctagaaagcatcgatgttcgaaatattggcctgatccctgctgtcgtcggtgaattttacgatgtccagataaggcggatgagcgatcataaaatcgacctactctcggtgcctttcgcccagctatgctgcgatcgcctcggaaaacggctgtcgatcggtgacatcgacattcttgattgcgtagttgatcgaagaccattcgctcataatgctattgacataatcgataattttttgggtgatgtcgaatccgatataatctttgcgcaggttttcatatgcgaacagggtagtcccgctgcctgcgaacaattccagcacggtatttccggcattcgtaagcgtttgagtagttggggaacgaaattgccgtgatagatattcttgtgcttgccttgcctatctctttcggggatcaaccacaggctgtccacatttagatcgatctgcttccagttatctttattgatctccataacctgtttgaatttatctttatacctcggctgaataagggactttgtaaaatttttttatcctacatagatcctttacggtgggatccaattacaaagatacacgaaacggtaagatatatcagctataaggggctgtttggacaataaaaaaggcggaaaacttaagttttccgcctttccgtacctcctcaggggctcgaaccctggaccccaacattaagagtgtcgtgctctaccaactgagctaaagaggcgtttgcaggtgcaaatgtaggatgttttttttatttctgcaagaaaaaaatattttttcttcgtaaaaaatgcagaggagggcttcgaaacggaattttgctttttttaccttgtgtatatactaaatagaatattatttaagttatatgggtgcatcgactggttaccgaattattatgtttcaagatttattatttcggtacatccgtccaggtgatggaaaaaacgccgcctgagggctaaaaatcatttttttgggggattttttgtaggtacgaatatttgaattttaaatgtaagatattcaatatattgtgatttttgattcgctttttttgttgaaaaaactgtcttaaaaagttgtttaagttagattaatttcctacctttgagggaatttcggattaagaattcgattccgaatgaaggcgagaatattgattccgttcggtgcagttgctttatcgcaggaatacgctggggaacggacgggacaaaagaattgaattttgttggttatattgtgtattaggattattctacgatacttgcatggtgaattttcgcttttttatgatgtttttaatacctaacttttaattttttattaaccccgaaggggtgtccggatttcgatctggtaactctttcaccaaaccacttgttatttttcttttgcgatggcgctcgtcgccatgctcgcaatggtaagtgcaagcagtggctgtagcgacgatgatggtgcaaattacagtaccactattgtcgccaaaactacgctttccttatcgaagaacgccgggacgggccgcttggcgtatgaaattcagggtgccgataaatcgtctgttgttacggcgacgacgaacgtggattggatcacgaatttcaattacagggagccgggatacgtccagtttgattacaccgccctcgatgaggacgtcgagtctcgttcggggcagatcaccctttcttatatgggggcagccgatgtagtcgttaccgtaaatcagggtggtgttatgtcgtttgaacttacgatcgatccgaagtcgattacggcgaacagttgtgcgatgcagatcgttccttcgaacgagagtgagacctatctgtgtgcttttatgaccaagaagtatgtcgattctttcgattctgaagaggaattcattgaagccgatttggaaatggtgaaagaacaggcagaaagtaagggaatggagttgtctgaatggttgaacatcttgctcatgaaaggttcgaagaccaatactgtgacggatctgaatgccaatacagaatattatgggtatgtgtacggttgtacgtctgatggtgtacctactacgggccttttcaaggcggagtttacgacccagaatgtcgaaatgaccgacctctctttcacggttgatttcaaacaggtgaatgctgagccttatcctgataacaatccttataacgtggaggtgacgatcactccgagcgatccggaggcgaagtggatgttttcgacgatgaacagttttgtttacaagattgatgaatggaccagtgctgagtatttgtctgagcttcaggcaagtgcgcgtgagcagcgtccgactctttatcagggcgagcagaagtttatgttgaacaaatctcttacgcagcgcgtatggggtggtaacgattactatttctggtgcttcggtatggatgacaactacaacatcaacagcgagaaggctgaagagtatttcacggttacgaccggagagattcctgtaaccgatgattgcacgttcacggtagagacgttgaatgtcgcggctcaggattgcgagatcaaaattacgccgtcgaatccggagacgagatatttcatcggtatgtatcctggtggtagtgccgagaaatacggtaaaaatgcttgtgtcgagcgtttgctccagcgtctggatatgtataattccggttcgggtctgggtgatggtacccctcccaactggcaaaccaacgaatgggtgcagaaaggcgaaatgacgaccaagatgggggccgatcaggagtggcgtatcgagccggagagcacttacgaaatctttattttcggtttcgacaaatacggacatcgtactaccgatatttcggtgaccgaattcacgacaccgaaatatgtcgctcctacagattttaagctgaaattcgagttctcggatgtcgaaatgcgtagcttcacttgtaaagttactccatctcacgacgacgtttggtaccatgttggtatcattaacgcagaggtcttcgattcgtataacggcaactggcttaagttcctcgacgatttgatccatggtgatggcggtggagccttgacgcagtatgtgggtgggaagacgttgtcgaccgattgtactcccggtacccagtatgtagcttatggttttgcttatgcgagcggtacctatcagtccgacttgtcgaccggccgggttgagtcgaaaccgctgccgcgtaatgagaacgcaactgtgtctggaacatggcaggtttacaacggtgatgaacttgcagctcgttatccctcggcttggaaggactataagggagtgcagtatgtatgcgtttaccaagcggagccgactagtaaggaaactgctcacacgtgggtctttgtccatgctcctcgtggtggcgatctgcctctgtcggatatgttgatcttcgattatttcgagaattatccgtttgaagccatctataaggatgctgagcatggtcgttgttccccgccgggagtaggtccttggggcttctactatgcaggtcaggacgcatccggtgcttggggaccgttgggctacgaaacaatcatgctgaacgatcctgaacatcagggtgatatcgatactgcaccgaccgatggtttcgacgataagcgcgaggataagtccagcatatcgactgtatcgaaggtgagcttctctgctccgatccgtttcagccaggcttcgttcatgcagatcgagcgcgagcgtgcagatcatggaaaagccactatcttcaatatgcctaaaaaggaggcgacggtaaacgtggatttcgatgtggatgcacagttgaagaacatctctgagaatattcgataatttgaagtcgaacagttattcgttgaactttcgacgagtaacggaatcccggaggggaagagatcattctcttcccctcttttgttgcttggagtatctgtcgagagaagcttttttctgttaattgggcgtgcttacggccgggactggaaatgttttctgatggtccagggcaatttgttggctgccggggtgttaccggctgattcggggagtttgttattggtcggggatattgttggtagcttcggagtggcttttcttatcgggcgatatgagagcggtgatggatggttttgtgggcgtacctgtcccggacgaaagagtggatccatacatctgtgttttgaacgatgatggtcgaaaaaggccggtcttatttggatttcgggaatgatgtcaggccgaattatgccggaaagtcaaggggcgtgaagggggcggcatttgattttcggtccggacctataatcttgtattcggcccaggtcctgtgagtctcgctgcaaggtgtgggttcatgacgtcggttatacgtttttttttacgcggtatatgtgacttgtacgggccggttgtttttgtgatgtgggctatatggtttttattggttgagcgattcattcggtgattgtttggttttttgatgcagagtacatggtttccggcaggggcgtgtgatctcctggtgcgagttcggtttcgcgcataaggagtggcctttctgcggctaaaggagggcgcttgtttcctgcatgccggtgtatcgtgctgtcagggcatcgcatttcgaggggcttgtttcgttcttgtatgtcaaaaagaggagtaggtcataatgcgaagtagaaagatttatccctgctacagatagttgtaacaggggtagatttctcaaaaagggtgttttgacacagtctctttttattctttgacggatagcccttattgttcggccgacagccggagtttgtcgctgttccactctccgccggcatcggggtagagaaccgggcgctccttttcgaggcccttgaggtggagataaccttcgtagaggttgactccgttggcggaatcttcggcgagcgagaatgctacgacgcacggatgcagtttcgtggtgtggtagctctcctcgatacgggcgatataggccgcctgccatgcgggatcgttgctgggattccctcccttgcggcgggacataccgctgcggctggtgttgatcggagcctgttcgacgacatagaagccatatcggtcgcaaaggtcgtacagcgcaccggatacgccgcctgccggaagcagaatcaggttgtacccctgttccttccattcgagcagttggctcggcgatacggtcgtacccaagtcgggtacggccttgagtgctgccggatacccgttgatcgccaactgcccccgggtgttgccgacggtgcggaagccgaccttgagcgatacgtactccgtataacggccttcggtctgtgtcttgagccgcagggtgtagagtatcgggttgcgggcgctccataccatcgtatcgggaatctgggcgaccagacgcagggtgtcttctctgcgcatgtcgagttcgatctcctggctgccgtatgtcacgacttcgtcctgcggcgtcagcagttcgtagtggattttcgctttcttgggattcagcgcgtcggttttcaccacgatgccgacctcgccgttgaagacgctgccgtttcggtacgttttggtgaacaggtcgcggatgcggatggtcggctgggaaaagacgtagcaactgcctaacgccggttcggagggatgcgcccaactttcgagtacggtgcttgcaggattggacagcaccttgatcgtcagattattggccccttcccggacctgtttggtgaagttgtaatccgccggattgctcccgttctggcaatatcccgcgaccttcccgttcaggcgaatttcgtaagccgacgaagcccactccacatgcaggagcacctggcggtttacccaggcgaagggcaccgtgaatttcgtggagaactccgtgccggcttcggtcgtcgttttttcccactctgtcagcggggtgaagtatttggaggcttcgcgcgatccggcggcagcctcttccgccgtcggatagacgacgaaagtggtgcgggaaagctccttgcctatctcgaccggctccggcgaagcgtaatcctgggcgcaggccatccatgcggaagagagaaggagcaaggtcaaaagactcttcataaggcgataaattttttatgcggctcgggcggatgcggacgagttggacccgccgtccgcctttcgctgtttagttaagtaataagatacgatcggcactctttgtctgcgagcccgtacgctcgctcccgctttgcgctgtattctgcggcttgggggcactttgcatacggggcgatacggattccgtcgccttttcgtatatttgtccctgtaaagttactaattttttccgaatatgattcccgactatccccggctcaattttcctgccgtcaaattgcggatttcgcagcgtggggagcagatgaccgtttgggatccgcttcggggaatctacctggtgctgactcccgaggagtgggtgcgccgtcacctgatcgggtttctgatttcccattgcggagcacagcccatgcggatcgtccaggagtatgccgtagcgatgaacggatctccgcagcgtgccgatgtggtggtcgtggacgaccgggcccgtccgctgatgctcgtcgagtgcaaggctgccgggatcggaatagaccgtcaggtgctggcgcaggccgtccggtacaattcggtgctgggggcccgttacgtggtcctgaccaacggcttgacgcactattgttacgagtgtgccgacgggcgatatacccgtatggaccgttttccccgcttgtaagtcatgagctttatgcgggcctgattcatagatttttccaaatattgttgcatattcgaatatattttggttaatttaatcaaaatatttgggggggggatttttatattagttttgcaccgaaaagagtaaaagcccccacacacaatatttattgaaaaaatatcggaatcttctgtatatagtaaaagacattatttcgtatctcgaatgttatttcgtaacgattggaaatcaacccttttacatcacttcaaattcatttgctatgaaaaagattattctttcatgcgctgccgctctgctggcgataggaagtgcctgtgcaactcccaaatttttgagtctgaacaataaacacggcaaaacaactatcaaaattgaaatccctgcatccgaccgtgatgaaaccaacggactttcgatcgaagatgtggtgctttataacgatggtaaaacctttcaggcaaagaaggtcgatgcaatttggggcgataattccatcgttattttgcagttcgagaaacttaccgctttcgaggattgcacactctctttttctgtcaatgggaaaccggtcagtctggatattcagagttgcctggccgattgcaaataagatttgcctctcatggtcggggttggtggcaagcgtgcctgtactctgggaatgcagagtttatattggggattcatatctttccatatatcgttatcccatgctcacagtatcgaattcgagggggcttgtctgctggctgtggccgcgtctgtaatgccgacaagggactgtgtcgagcacaatccttaaggggagtcagaatggatgcagtgcgaggcattgagggcaagggcaacaggaatttactgtcgtaaatgatttaactcgcatcccgataatgacgtaacagtgcgcctttatgacacaccgccatatgtttgcctcccataggtaccccgaaagcatatgatcgcgctttgttgtctgctgccgggctgtcgaatgcccgttccgggacgggtacgatttttcctcaagatttcggacgcgattctccgttatagattctggtaatgggtttcgatgtaccgttggaacgtttcccggtagttctcgccgatggggatgtattcgctgtcgcttacgaaaacccggccttttacgtagctcctgatacgttgtagattgacgatgtaggagcgatggacccgcatgaacatttccgacggcagggccgcttccatgttcttgagccggaaaagagtcgtgatggtcgatcggtcgtccagatggagccgtacgtattcgccttcgctttccagataaacgatgtcgctgatgcgtaccagtgtcgttttgtagtcggctttgatcgagatgtactcccggtcgcgtggagtggcttccggggcaggagcgtttccttgtgtcttccgataggccagcagttcgtacagcgactgcgccttggctgccgagcggctgaaatcagcgaagctgaacggtttgagcaggtagtcgatcgcatcgagtttgaatccctcgacggcgtattccgaataagccgtcgtgaagataatcatcgggcggctgacgagcgaacgtacgaactccacaccgctcaggtcgggcatgttgatatccacgaaaatcaggtcgatcggattcccggctagatattgctgggcttcgatggcgttggtgaatgctttttcgagcttcagaaaattgattttggcgatataaccctgtaattgccgcagtgccagcggctcatcatctatggcgatacatttcagcatggcatgatggggattatgagtttgacggtatagacggccggatcggaatcgtcgatcgagagcgtatagttgtcctggtaaatcaatgccagccgttttttgacattttcgagtccgatacccgtagtacccggccgggatttttcgtgacggctgttgctgatgacggccgtcaccgcgtcgtcccggtagccgattcggatatggatgaacgaggcgtggttataacttactccgtgcttgaacgcgttttcgacgaatacgatcagcagcaggggcgggatggccactttgttcgggatcgtggccggataatccaagcatatatcgatgctgctgtcgtaacggatgcgcatcaactcgatgtagttctcgatgaattggatgtcctttttgagcgatatggtttcgctgcccgattcgtagagaacgtaccgcatcatcttggacagttcgatgacggcgcttttcgcgtattcggtatctatgtcgatcagggcgtggatattgttgagcgtattcatgaagaaatgggggttgatctggtatcgcagataatccatttccgcttgcaggttctgacgtttgagctcctccatttgctgttcgtcgcgcagggagcgatacagcagtttgatacccatgttcaggcccgtcatgaagaatcccagcaggatgttccaatagatcgccagatcggtgaatgacgctttgccgttcaggatgtagggttcggtgtcgtatggagcgtatttttcatagatggcgaccagcgagaaaacggccgtaatggtcagcagattgacgaccagataccatacataacgatgttttcgcagtaacagtctgggagcgatcaggctgttgtggatgatgaagatcagcagataaggtgcgatttttagccaggcgatcagaatgttctccagactgacgtgtacctcttcgagcattttcgagttgaggaccggtactaggataatcaccatccataccatcaggtacaggaggttttctccgatcatttgtttgctgctgaatttcatattggcaaagatagcgataagccggaggcaaacgcaaatttatttgcattttgtcgaggcgaaatgttcggtgtcaaagatagtgaaagccgagaagaaaacgggaacttgttcatcgttttccgaggcgcatcctgttttctgcaaagatagtggaaggtaaggaaatcgtatggactattgtgaagatttccgagaagccttcgaaacagcttgccgcctgaaaaggcggcaagctgtttcgaagggaaacttgtcggattgtcggcggaaaactcttcgatagcgatttttcgtgcttcatcgaatcggcctatttctccagcagagccgtattgtataggtagcgcttgatgctgcgtttgggcgtcttttcaaattcggtgggatagaccgtgatacttgcgacctgttcgtaggatgccaacagtttgttgagttccttgaggttgttttccatgattcggggcagttcctctttatcgatcccttcgagctccgcctgttcgaagtcgggaacgaccaatgccgtcaaacgtccgttgtgctccagaaccagcgattcctggaccatatacatgttgttgagtttgtcttcgatctcttcggggtaaatgttttgtccgcttcccgtgagtatcatggttttcgagcggccgcggatgtaaagcgtgccgtccgggtccatcgtggcgatgtcgcccgtatggagccaccctttttcgtccaggaccttccgggtttcctcctcgttcttgtagtaacccatcatgacgtgctcgccgtgcaccaggatctcgcccgcgacgtgttcgggatcgggcgagtcgatcttcacctggataaattccgagaggaaacgcccgcaggaaccggccttgaattcgttgtcgggagtgaagctgatgagcggagcgcattcggtcatgccgtatccaatcgtgatcgggaatttgatactcatcagaaatgcttcggtttccatattcatcggtgcaccgcccacgatgaagatgttcacctctccgccgaacgattccatcatcttcttgcggattaccgagcgcagggcggtattcagcagcggaatcttcatagcgatactcatcggccccttttcgagcagcggcagtacctgtttgcgatagactttctcgagaatcaggggtacgcagcaaatgatcgtggggcgcacgacctgcatggcttcgatcaggatcttcggagtgggaattttgcccagcagggtgatgtggcctccgacggccagcggcgcgagaaagtcgaatgcacagccgtaggcgtgtgccagaggcaggaacgagagcgtgcgtccgccgcgctggaaatagttcgtgccggtttgggtgtttatggctcctcgggcgaagagcacgttgcccgtcaggttattgaccgagagcatgacgcctttcgaatatccggtcgttcccgaggtgtagttgagcaggatcatccggtcgttgggaatcttgtgaaagcggatatgctccggtccgaaccctttcggataggctttgcggaagtgattttcgcggttcttctggaaatccgtcagtttcttcggatcccggcgctcgtagatcgcgttcaggtccgtgagcgagaagacggcttcgactttccggatctggtcggcttcgatcgcgtcccagaacgtgtcgcccaggaaaagcagtcggctttccgaatggttgatgatgtggatcacgtcgttggcatggaaatcctgcagaatgggcacgatgaccgcgccgtaagtgatcgtggcgatgtaggtgatgcaccagcggggattgttgcggccgatcagcgcaattcggtcgccctgccggatgcccgcctcgtcgaagagcagatgcagcttggcgatctcggcgcccatttccaggtaggtgaagttctcctgcttgaaatagtcggtcaatgccggcagtgcatagttctcccggaagctggtttcgtaaatattaatcaggttttcgcgtaacatagaattttcggtatcaagtagtggataattcaatttttagggcgaaacgcctgtcccggggggactggtgtccggccggattcgggttattcttcttaacctcttccggcaaagataatatatgccgggaacaaagcaaatttcgtgtgtttcgctttttgacagttcgtacaaatcggtattcgttgcgagcaaatatatgaaaatctatccaatcggtaaaatacccgttttttgtcggaagaattcggggatgccttcgtttttattttacaaggccgtttcagccggtttcgacagatcggatcgcagcggaaacagacacaaatagatcgaaatcggacaatacaagcgtgttgaataatggcgatttccggctcgctatttaccgtggattgaaagtccgatctgaaacgggcggatgaagcgatccgaatgaccgttggggcaggagatggagcagtcggatttttttgtgcctattcggatatggttccggtttcggaccttattcgataaaaaacgattcgccaaacaagcgaatcgtttttaccgtgctatttgtccgcttttcgatggggcttccagatgtatattttggattccgtgccgtttttcagccgaacgatatttttgcggtgggtgtagagcagcagaacggccgtgacgaatgagaagacgatgaacggcaccgattggtttaccttgggcgaaacgatcgtgaagatcggaaagcagcagccggccacgatagacgcgagcgaaacgtaatgcgtcatcatcaggatcacgacccatacggcgaaacagagcagtacgaccggcggataaattcccgtgatcgcccccacgagcgttgccacgcccttgccgccccggaatcccgcgaaaatggggaagatgtgtccgagcacggcggcgaatacggcgatgatcttgatatttatcagccacatatcgttgatgtaggcgtcgtatttgaggatctcggtcaatgtgaccgcgacgaatcccttgaggaaatccagcagaaagaccggcagggctgcccggcgtcccagcacccgcagcatgttggtcgtaccggcgtttttgctgccgtgttcccggatgtcgatgccgtaatattttttgcctatccatacggcgctggggatcgagccgagcaggtaggcgatgattatcatcgtgataatgcaatagtaagtcagtatcatgccctttatttgtcaggattgtatatgcaaatataaacgaaaaaaatttaaatactgcggctttttgggaaaatagtccgaagcgaacgggaaatccgggagtttttcgtatatttgcaaaattaaatcgattattaaccgctctaaaacagttaactttatgatcaatacgaaagctttattggagccgatggggtcttgggcctggtggcgttcctggattcagttgtttgtcggttgtgcgattatgggatccggtttcgttttttttatcaatccttacaatttcgttccgggcggagtctatggcgccggcatcgtattgcataatattttcccgtcgatccaggtcggtactttcggctatatgttcgacgtgccgctgatgattaccgccgtattggttttcggcggacagttcggcgcccggacggtggtggctgcgctgttcacgcccggttttatgaatatcctgacgcggttggtctattccgatgcggcatttacggccgacggtatcaatctcgatccggcgctattgctgggcggttcgctcaacttgtcgaacgatctgttgctgacctgtatcatcggtgcggtcgttatcggcgtggggcagggtatggtcgtgcggacacaggctaccacgggcggtacggacattatcgccatgttgcttcagaagtatgcgggcatcaagttttccacgggtatcttcctggcggattgcgtggtgatcctttcaggcttggtggtgatcggtttcggtctcggtacgggcgatagttcgggttcgggctgggtgcttactttttattctttgattttgatttttctcgcttcgcgggtcgtagcccgggtgatcgacggtgcgtcgtacgacaagttgctgttcatcatcagcgatgaaaacgaaaaactccggacgttcattctggaggatctggaacgcagcgctacttttatcaaggcacggggtatgtactccgaggaggaaaaggatatgattttcctggtggtcgatcgcaaggaggtgcatgcggtacagcgtaaggtacaggagatcgacccgaaagcattcttcgtggttacggatgcctacgatacctacggagagggcttcaagcccttcccggaagcgggtgcaattcaggcacagtaattttcagaaataccggggaaacgggaaccgcgatcgtcgattcccgtttttcggtcctaattttaccgggtggttccggactgtgaatatgaatgacgaaaaaaagataaataccttgcgtccgttgcagggggcgggccgtaaactttttgtagaaacctacggttgtcagatgaatgtcggcgataccgagatcgtcgtagcgatcatgcagcaggaggggtatgtctataccgacaagatcgaggaggcggatgtcgttctgatcaatacctgttcgatccgagataatgccgaacagcgcatttgggggcgtttgcgggagatggctcatctgcgccgccgccggccgggagtgctcgtcggtattatcggttgtatggccgaacgtttgcgggaacggctgctcgagggggagaaccccgtggatatcgtcgctggtccggatgcgtaccgcgacctgcctcgcctggtgcgcgaagcgggcgaaggcggccggggtgtcaatgtcctgctttcccgcgaagagacctacgccgaaatcgctcccgtgcggctcgaccgcaacggcgtgagcggttatatcgccatcatgcgcgggtgcaacaactattgttcgtactgcgtggtgccttatacgcggggcgtggagcgcagccgcgatccgcagaccattctgaacgaagctcgcagcctgtttgagaacggctaccgggaggtaacgctgttagggcagaatgtcaattcgtatcgctatggagcggtcgattttccggagttgatgcgccttgtggccgaaatttcgccactgttgcgcgtgcggttcgcaacgtcgcatcccaaggacatgagcgaccgtctgctcgaggtgatggcgtcgaaacccaacatctgccgctgcatccacctgcccgcccagtcgggatcgtcgcggatgctcgagaagatgaaccgcaaatatacacgcgaatggtacctcgaccgcatcgccgctatccgccgctatatgcccgattgcgcgattacgaccgacctgatcgccggattctgcagcgaaacggacgaggatcatcggcagacgctttcgctgatgcgggaggtggggtatgaattcgcctatatgttcaagtattccgagcggcccgatacgttcgctcaacgtcacatgcccgacgatgtgccggattcggtcaagacggcccgtttgaacgaaatcatcgccttgcagaatacgctttcggccgaaagcaacgcccgcgatgtcggcaaagagttcgaaattctggtggaaggtacttccaagcgcagcgaccggcagcttttcggacgtacgtcgcagaataaggtggtggtcttcgatcgcggcgagtgccggatcggggattacgtgcgggtgcgggtgaccgcctcctcgtcggcgacgttgcagggagagttggtcgaaagaacccgcccgtttgaagtgtaataattggaaaagaaagaaaacgcatagtatgagatttgacgaactcgatctggaagacgaggtgctggacggcatcgacgccatgaattttcaggagatgactcctgtgcaggagcagaccattccgatcattctggacgggcgcgatattatcgcctgcgcccagaccggtacgggcaagacggctgcctatacgctgccgctgctgaaccggctgctgctcgaaggcaatgagaagaacgtcgtgaaatcggtcattatcgtacccacgcgcgagttggcacagcagatcgacatgcagttccagggcttttcctactatatgcccgtttctaccgccgtaatttacggcggcggcgacggccgcggctgggaccagcagaagcgcggcctgcaaatgggtgccgatgtggtgatcgccacgcccggacgcctgatttcgcaccttatgaacagccgcgtcgatctttcgcatgtggattacctgattctggacgaggccgaccgtatgctcgatatgggtttttacgacgacattatgcagatcgtttcctatatgcccaaatcgcggcagacgctgatgttctccgcgacgctgccgcccaagatccggcagatggccaagcagattctgaacgatcccgccgaggtcaatatcgccatttcgaagcccaacgaggcgatcgaacagggtgcttatatctgttacgagggccaaaagctggggatcgtccgcgagatgttctcctggccttcggagtccaagacgatcattttctcctcttccaaacaaaaggtcaaggagttggcccatacgctcaagcgtatgaagctcgacgtggctcccatgcactccgatctggatcaggagaaacgcgagcaggtgatgctcgattttaagaataataaagtgaggattctcgtagcgacggacatcgtcgcacgcggtatcgacatcgaggatatcggcatggtcatcaattatgacgtgccgcacgatcccgaagattatatccatcgcatcggccgcacggcgcgggccagcgctacggggcgggccgttacgttcgtgaacgaggaggagcagggtaaattccaccgtatcgaggagtttatcgagcgggagattccgaaattgtccttgccggaagccgtaggtgcaggccctgaatataaccccgccgctttttccggtcatggcggccgccggggacgcagtgggtcgggccgtggcggaaacggacgcagcgggggacgtggtcggagccgtggacgcgacggtgcgaagagtgccggtccggtacctgcagaaggtgtcgtcgcggctgcgaatgtggagtcccgccacggagaaggtcgtggcgagggtaatcgcggcagccgggaccgggggcgtcgtcgtaaccgaaatcgcaaccgtaatcgcaataaaggcggcgacgatacgccgcaggcatagtgccttttgaaattcgcagcgccggattgcggctcccgaaagtgcgggatcgcagtccggcattgtattttacggagccggccaagaccccgtaaaggtatgtccaatgtcccggaacgatgctggaataccgtccttgattgcctcttgcaaggaaaccgatccgcttgtgcggaccggcctgtcgatgttgtcgccgggagcaaggtgtcggctggcatttttcgaagtatcgttgtcgaggggagaaagcctgcggagccggaaagagtggcggaggcggaggcgtcatcgatcccatcgtatgaggcttttcgcgtcgggccgttcgtgccggacgggccttgttttgcggggcgttcggacagggtgaagaggacgtattgcgtaaaatcccggatgaatacatattcatccgggattttgtagcgatcttaacgaaatggaggaacctcctttcggtgcgtctgctgcgaatcactttttgttgcggggatcccacgtcgggtgtgccgggtcctccgctttcagggcttcctcatagtcgatacccaatgccttcgccacgcctttgccgtattcgggatcggcgtaggagcagttgcgcacgtgccgctgtttgatgaagagggcgctgtcgcccatcgcgcgggccgtgttctcgcacgtcgcccgttggtcttcggccgacatcagccgccagagcttgcccggttgggtgaaatagtcgctgtcgagttcccgttcgtcgtaattgtagatggcaccgttcacctccaaaggcggttctttcaggttcgggctgtcctgccattcgccgtagctgttcggctggtaggggatcgtcgctccgtaattgccgtccgtgcgcatctgtccgtcgcggtggtagtcgtggaacggacagcggggtttattcacgggaatcaggttgttgttcacgcccagccggtagcgctgtgcgtcgccgtaggagaagagccgcccctgcaacatcttgtcgggcgagaagccgatgccttcgatgacgttcgcagggttgaacgccgcctgttcgatttcggcgaagaagttgtccgggttgcggttcagttcgagaatacccacgtcatgcagcgggaaatcgccgtgataccacactttggtcaggtcgaagggattgattttgtagtttcgggcctcctcttcggtcatcagctgcacctgcatcagccagcggggataatcgccccgttcgatcgcttcgaacaggtcgcgctggttcgactcccggtctttggcgatgaccgcctcggcttcggcgtccgtgaggttcttgatgccttgcagggtgcggaaatggaatttgacccatgtgcgcttgttgtccttgtcgtagaagctgaaggtgtggctgccgaagccgtgcatatggcggaacgaggccggaatgccgcgcggactcatcgtgatcgtcacctggtggagcgcttccgggaggagcgtccaaaaatcccagttgttgttggcacttcgcatgccggtgcgcggatcgcgtttgatggcgtggttcaggtcggggaatttcagcggatcgcgcaggaagaagaccggcgtgttgttgcctaccaggtcccagttgcccgtgtcggtgtagaatttcatggcgaagccccggatgtcgcgctcggcatcggcggcgccgcgctctccggctacggtcgagaagcggaccagacagtcggtctttttacccacctgcgaaaagatcgaggcccgggtgtatttggtgatgtcgtgcgtcacggtgaaggtcccgaaagctcccgatcctttggcgtgcatgcggcgttcggggatcacttcccggtcgaaatgggcgagtttttcgagataccatacgtcttgcagcatggcggggccgcgcacgtcggcggtttggatgttttggttgtcggcaatgggtttcccgttttcggaggtcagtcttttcttgtccatatcctatcgttttttgtcggcatgcagaaaatgccggaccggtttatgattgaatttcatatcgttgtaattcagagcaaaaacattgccatacagactggcgttgcctctttggggatatgttttttctgcgaggagcggactgtcggagcgaatttttcagggaaatcgactctgtttttcgaggatttggaaaatttcactatatttgtcccgttaacgggggattagctcagttggctagagcgcttgcatggcatgcaagaggtcacgagttcgagcctcgtattctccaccaaacaaaaaccgcctcaaactaatgtttgaggcggttttttgtaaaagagcccgtgttggattattctttttggacaaacaatggacaaacaaaatagcgatttataacgattgcaagccgctattttctgatagttataaactctgcgtcgataatttcagcgtgcggattgtggtttatgatggattggtcgcgcgacttgacacgcttcgttcgccaaaggaatccgaggaaccgcgcatatttgacgcgctccacgtaggtaatccggtcgcggcttatgacgtcggccttgtagctattatcggggaaaatgcagcacgagaaatcgagccattcgtcgtgatgctcggcgcaccttgccggaacctcggcggccctgtcgggtgtgacctcgacaaaaacggtatcgcgggccttgccctgcaacttgtaaatggtctgctgctgtatcttggtcagttgctccaactcctttttcttaacgcccatgtcgcggattaacgcggcatcgtcggcgcggtaccgctccaactccgccacccgcagctgcaattcgccgactctaacggcctgctcgccgcttttggtttgataacgttccacctcgctcagcagtacctcggtgttgttgtggtatgcgtcccgctcccgccgcaattttttgttttgatggatcaggaagccaaatgccgtaatcacggacagcgctaccagcgccacgatcagatactttttcatactttcccgaaataacggatccagttgaacgatttgcggccgcgaatatactggttatctccctcgttggcgtgcgcctccatctcgaacatggatgcgtaataggccgtgtccgccgctgcggtcgcggagagcttccgccgcacggtgttgtacacccacgaaatccccgcctcaacaaaatagatgatgtagtagagcaggagcgccacgacgaatggccaaccgccccacccgaacgccaaagagagcatcaaggcggcaagcagtgcgacggccgtaacctccatatactgctcgacgtggatggcctcgtggttcactgcttttgaactcaacggctgcgcctgtttgcgcttcgtgcagatgaaaccgaaaatcatagctgtttcgtaatctttccgccataacagcaggcgggccaacaggttgttgtaatagatttttctcatggctaaagtgattttacgatgtttgccacggtgtcgatcaccgaggccataatagcggcgtaattcggcgccgtggcgtattttgcgcccgtgttgtccaccaggcggcgggcgtactccttggcatcaccccggtagggccacgcatcggcgtacatcggtttcttcagcagcgccaagtgatcgtcgaggcacgcgtccacggtcgggtatacacggaaaaggcgatacacgcgatatttgtaccgatcgggcgcaacttgctcgaccgacacaacccgctcgggagccttgaacgccacagtcggggtcttgaaatactcggttgtcagctccagcgacacgtcgccggtccagcttccttttgtgatcccaaaaatgttgttaccgatccctcggatttcccagcccgtttccagcgccgcctgcgcggttacgaatagggggctgacgccgccggccttggccagtcgttccgctgccgggtacacttttttgacaaattcgatttgtttgttgttcattgttgttcgtggtttttattatgtgttttctcttgtgatccgaaaggcggctcccgatcgggacaatttactttacagcacttgtacagagtaagcacggccttttgcgatgccagcccgtcgagttgagagcgcatgttgccgatcgttttataaagcccctcgattttgtcactttgggcatccactttcttttccgatcgctcgaacagttctttccactgcgacgatacggtggactcattggctaactcggccgcccgtttcttgtgcttgcggtcgaaaaaaatacctatgccaccgcccgcgctgattgcggcgatcgccgcactgatgattgtcgtccaatccatatttgtcgttatattttattccgataagaccgctggatcgtccgaatggcaaaaaccgactcgtcaaaccgttggcaaagaccgaacggtcaaatccagggcataatagtttattgttctctaaaaaacggcggtattgcgatcatatcgccagcagtaaaaaaagaccgctggatcgtccaagtggcaaaaaccgactcgtcaaaccgttggcaaaaaccgaacggtcaaatccagggcataacggctattagtcagttaaaacagcatattccaatttcccgtaggatgcactacatactaccttaaattccttgatctcactcacctgaatcccatttttgaatgccgcaaatccgatgttttttatcataaaatttttataatccgggttagggctgtcaggtttgtcaaaatctgccttttcgatcttgtaggttaagcccaagcaaagccgggtggtttccaggcccgagtcgtaccaaaacatccagcctacaatgtgcccaaaacttgctcgggagttattgtagattaatgtcgattccttgaatttttctatgccaaactcagttatcgctttgtcgagcgattcgtttccaaattcaagggcaaaatctgcctgcccgatagataccccatgcttgggatgcctccaggtcttggatattttacgcgtcgatccagtaggaccgctcgcaaacttgtaccgcccttttgtccggcggaaaagataaattttatagtcggcaacattatccgcgtcgcccacgccgtaaagcgatattatcggccacttacctttatcctcaacgtcgccggttttatagttgtcaatggtgagcgtgatggggtatttcggggcttccgttggggtttttgccataccggcgccgctgatctcccacgaacctttgatggtcatgtattcggttttctcgatcggctgccgaaccttgcgggcgaacaaacggccatcggttgtcagcagcccaaattcggcgatcgactttccggcggcgtccatgtagccaaaggtgaagttgaagcgcacggtgtcgggcgcggggtactcgaccgtctgcacatcgacgatagtggggtcggttatcgacgtgtcgttctcggtcggcgcggttccgttcgttcccgccgcgacctttgaaatggccgcatttggcaatcctgccagcgcctcggcggcgatctcataggccccgtttacgatttggttgctttgttgcaggctccacaactcacgtccctgctggtcgtaggcgatcaaatgcaggacgccgtctattggttttacgatctgcttcataattagaaatctgtacgattgtttgaccctattacaaaatatccaatattcgttttagccaacataaggcttacatatccaccttgtgagacaaggattatattgtcggatttataactatgacctttaaactcactttttactgatacattaacagtaataatatcgccatccgatataattataacaggaattatcgcaggcatttggctgaattttactttgtcgataccgatgtcgccgcaatttatttccaggtctgcattattacctgacgatgttgcattcgtaatattaactatcgttgattgccattttccatttgcggtattatatgtaaaaagatcagttatcggaattgtgagaatgttggatatgctgatatttttaataccttccacaacacacggcgctaaagtcctttcaagtagctccgcagttattgcatttttctgtatgacccgaccggtgattatttcgtcggcgaaaatgctctcatcgttcaatgattcctctgcgatttgggacgctgtaatagttttatcggctatatttgcagcggtaatctttttcgcgccaaccgtcggactcgggtacgtaccggcgagatcaccaccggcgatctcggggatcaagtctatcaccttgcccaaaaactctctgatcttcggctcggtgatctcgcccgtgtcgttgttcgggaaatactgctcaagcagcccctttaagtcctctttttttgccatattcttgcctttttatttgaatccacgattaaaccccgccgagaatgcacgtcggcgggtggtaacttcaacattcagccagtcgttggtgttgaagactatttcgctggcctcgattctctgataatagcctacttcgaccaggtgcgaccgctcatttttatagaactcgacgaacaggtgtatttttcggctctcctcggcggtgatgtggcggctatcatccgcctcaacgaatacgcggaaccgcgcccagtcttcggggctttcagggccgccgggcagagccgttacgccctcctccaaaatgacgatcgggaaccccaccgtgcggcacgcttcgcgaatagcccacggcgtaccgataaacttgtgcagcgcgatggacttcttaatgatgtcccgctgttgctgttcggtctctgccattccgaatccttgcaacccgtcgatgtcgaactggtcggcaagatacggcaaggcgctcggggctaccgtgtccaccaagtacggcaggaactccgataggtcccagttgtcccatcggtcggccaccatttccgaaaaggcccgtgccagttcgttgtcgctgatcgcgcttgctatgacgtttttgtcatccacggctaaatcctgttacgttcacggttattcccgtgcaatttggaaattgttcgtccgatatgatcaggtttgcggccggcgcgacgaccgtaacgtcgtacacgctggacaaccggcacgcttgggcaatgtgcgaccgtatgatgtccaaaccgagctttgcccgcttctccttggcaaaatcttccaaggcgctggtgatacttgcccgctcggtcgcggcatcggcgccgtcgtacagcaccacgtccaccatgagcgcataatcctcgcgctccggcgccgatacgattaccgtgtccgtgagcggccgcacattctcagcgttgcacacgttgtacacatccgtaatcacctgcgcgggcgtttcctcttcattcgtcagtggaacgatcaacacactaccgggtaccggcgaagacacggacacgtcggtaatcatggcgttggcacttttcgcgtaaaacttgtaactcgaccgagatcctgccgatgaatattgcgatggcgccagtttgatgcgctcacggagctgcgcgtcgctctccacatcggaacctccgcccgtgacgtcgatattttctaccgtcgatacgaacgccagcgggtccagtattttgttaatcgtaccgacggcataaccattccccaccttgcccgcaacgtcggccaaaacggacagttctacggtcatagtggcgagggcgattatggcgtcgtcgatcgtgcggaatatcgccaaaccgtcgctgctcgatacgcgggttccctcgggaatcaaaacggagccgtgccctgcaacaagagtgaagcggacggtacacccagcactggccgccggcaaacgctcgacggccaccaaacccgcgatgtaatcgaggattggcgcggtgctgaactggtagagcatttgccgcatacccgcattaaagcggttcacaagtagcgtttcgcggaacaccacgaaattgaggatcaactgctcgacttgggcaggttgcaattcacgccccaacagctcctccagctttgccttgctctccgccatgattacggcgggatcacgttccacgaatgttgggatattgttgtcaatagccattatatgatcgttgttatcgttatctgttctgccgatcctaccaccgtgccctcgatcttaaaaactgtgtgggcggcatcgttacggctcgcggaaatgcgggttacatcgaggcgcttttcccaccggccgatggccgtggtcgcttcgtagatgatttttcccaacaccgatggcaggggtttatctaaatattggtacacgttgctgccgaactccgggcgcaatggatcgctgcccgggatggtcgtcaggatgatattgatggactgtacaatatcatccaccccctcgacgatcgccgccggatcgtccatgctgacctgccagtttcgtgtgtcgttcggtgcaatcatacggcgcttgcggttatggttcccgttactgggccggcggtattcgccagcgtgatcacggcggtatttaccccctcgacgatcgcggcagccaccgcgttcgtgatggactcggcgatacgatcggcggacgcctcggggttatctgttttgtctcgttcggcgagcatggcggccttgatcgccgctttcaatgctgatttctgtacgggcatacgcttatggtgttggcggtcccgacacgcctgtactggtcgggtgcttgtgtgttgttaattttattttctgcgttccggcggtaacttcaacgctggcggtgatctccccggtaacagtggtgtcgcccgtgatgttcacctcaccctcgacgttcaattttttgcacgcgatcgacagctcggaatccggtgcgttcacgctcaacttatgcgccttggcatcatagaacacctcggcgccgtcagcgtattttacgcccatagtgtcaggtccagcccagtcgggtggtgtgtccgtatcgctccaaagtaccaatacaatggcgccctgctcgcaattctcgtccattgaacacagcacttgcgcatttacctcgaccggtatccagtgcttcgttttgtaggtagccatagacgggatggccagccagccggaaacgatctcgttctcgtcgaacgaaacacgcgcatagcccaggttctcaccctcgccgatctctgatattatacccagccgaaacatacctatacctctatttttctaattgtcgccgtggttacgtacccgcttgaattatcgaggtcatgagccgacgataccacatgccactttccggaaaacttgccgatgccagtcagctcgatattgatccccgctaccagcttgacattccccgcaacggtgatgctccccgttattttgtccttgtttttttctttcaacgcacccttggccttggcttgggcctgcgtctcgttctctaccgtaacgtctccctgccacgtgtctttcgacaatgtgcccttgcctccctcttggtctgacggctcgatcttccatcgccggacgctgttggtcttcatattgcgggtcgccacgacagccccgccaaatacttggctcgttttgtcagtgaacgacgcccggctcaattcgtttttgtgaatggtcatcaccacgggctgagactccagttcctcggtgtccataaacacaagttgatcgccacgaacggaaaatacgatcccgtactctctggccagcctgcttaaaaatgcgaggtctgtctgcttctcctgcgtcttgcgctcgacttctatcttttgcaggtcgctgacattgcccacgagcttcagcccgtgcttcgtcgcaaagtattgggcgatctgcttcaacgactgcttttcgaacgccttgctgttcttcgagcgcagcgccttggatatagcggcaccgatagctttgattgcaaccgtatcgggcgggaactccagcccgatctcgtctatctcaaagagtccacaatccagcggagcgtcgggcgtgccgatcgacacctccagcgtgtcgccttgctcgggataccatccgtttttccaatggtcagtggtatcttcgaacgtcagcgtcaaatcgtcactttccgcctcctctttgtctgcatacgacaatcgggagagatagggcgacacgtcggcggttacgttcttaccattgacggtgattttcgcaatgactttctctaacgtttccatggcggcaggtctgtatttacgtgcatatcgctgtcttcgacgatcgggatcaccagcaccgtgcccagcgggaagaccgccgtaagcggtatgagcgggttggcatccgatatgatggcgatcccgtccatactgccgtaaaacttggcagcgagcagatcgatccggtctccctcaacggtcgtatagttgaaacttgacatttaattgcctccctcttttgttcctgcgaaccccgctaccggcgtggcgctggtcgttactttttccgcgctgtcggacaactgcccgacattcatctccagcaccgacacatccaccacgttgtcgatttttgcgaggttgctggcatatgcaatcgcttcgtccaatgatgtgggcaagtcgccagcgcgatcgattattttctttgttgccgcgactttcgttttggccgacgcatagagtccttgcgcatcggcggccagttgctggacctcgcgcaccccgcgcttaaggctggtggtcctgcttttcaccttagcaatcgactgcttcattccgctaaccttttccttggctgcggacacgtcgttggttatacctgtggcggggcttggagccgacgcaacaggcgccaccgcgatcggcttctgactactcagcgcccgccctgtcggggctgcttcctcttcgccgggactctccagcaaattcacggtgacggttgccagctccacccatccatccgccgcgcactgctggttggcgatgtccaagctcgtaataacgaatttcccgacaattcgcccgtctccggtaatgtacggcagcacctcgaaagcgtgcatcgacgctttcaacgcatatatctcggcctgcggatcacaaaattctgatgaatatgtgattgtcaggctcaactcccgcagctcggcaccagtcggctggatggcgtctttgtcattgacacgagggatttggccgtattttacggcatctgcctcgctggtcgatacgggagttttcagcccttgaaatatgtgatctccgagttgtgcaaacatgggtgccagctattacgcaaaggacaaacgtgtcttgttttcttcatatttacgaatcagttccatgatctcgttcgcgtgctgcttcagcatttttccgaactcgtcccgcgcctcccgcgtagtcgatccggcgaatgtgatctgcggggcataggtaatggacgggccggtattcccgccgcctacaatggtcgaggtattcaccgtgctggattgcatcgactgcgtgattccacgggtcgcttgcatggccacgccctcggtagcattttcgacgattgcaccccctcgatcaaggccaacgaccagcccctgcgtgatattcagaccatattcggcgaacaaacgggacggggaattgataccgagaatagacttgaagccgttggcaatcctacggccgatattcttcattccctcgacaatcttatcgaccatagaggttattccattccaaagcccttgcaataggtttttgccccactcataaaagcgggggccgaggttctcgaagaacgtccccacattctcccacgcgccgcgcatccattcgacgggttgcaggttgctgaaccagtctttgatcccgccccatgcgttcgaaatgccgctcttgacgttaccccaaaggttagagaaccagcctttcactgatccccatgccttttgcactccctcgcgggccttgttgatggtatttttgataccctcccaggctttccccgcaccggccttgatcccgccccacaagttcgagaaccagcccgttacagtgctccacacctttttgatcgcttcccacgccgctttgaatatcccgacgatagcgtcccacaactttttgaaccacgcggcaattttgtcccaattcttgatgacagaatacacaacggccccaagtgcaataatcaatgagataatggttaagataggatttgctttcaatgctttattaaataactttgtggcaactgtggccagtttttgagttttcgtatatcctttcatggccttatcaaccacaagaaaggtattttttatatttttgaatattgaaatacctattgttacagcatccgacatcgctcgaaatgcttttcggaactgtagaataataaaagcaacgctaccgatcgcaatggcagccgtgcctaatatagcgatccatttacccgtggtcatcgctatattgccgattgtggcggccagttcgggattttcctgtacccattttgttatcttatcgataacctttgatattttttcggttgccgccgacaatgcggggatcagtgctgcacctaactgtaacttaacgcctttgacctgctctccgatattttcgagttggtcgctaaatgcgtcgcccttggcaatcatctcgttacttaacgcaagtcccaaacgctcggcttcggcgtaaaacgcttttagaccggccttgccatcgttcagcatagggatcagatcggcacccgacttgccgaacaattcaaccgccaaagcggtctttccgatgccgtcttcggtattatgaaaaatatcggctacatcctcgaaaatctcgttcggctggcggagattacccgcactgtctttgattttgataccgagatcctcgaacgtctgcatgtacgtcttatttccgccggtagcttcggcgaccattctgtcgaacttcactaacgacgcggacaatttttcagtttcgacccctgacatcctaccggcatacgcaagtttttggaatgcctctacaccgatcccggctccccgggccatatcgtacatatcaccggcgtaatcggctgtcgattttccaacggccaaaatactacctccgacggatgcgctcgcgcccagcatgacggttcctgctttcgtcattgagcgacctattttgcttgtggtacgctcgaatgcagaaagtttgtccgtcgattttttgacggcctcgtctataatgcggctcattttatccgttgcagacaaaatgaacgctaatttcagagtgttggctgccatgtgtcgttatcgcttttcgatgccggataataccacccggcggggtgttgtgatctctttttcgtaaatctcgactgcgcggtccaagtaggcaaaataatcttccacgatcagatcgagaacgccatctattccgccgccggtgaagtgtgctaaaaaaacaatatccgcatgtgggatttgtctgattagcacccttgcgccagcgtcggaccttatccgttttttgagatgtccctttctacctctttttttgcgtcggggaaaaggaactcggtgatcttatccatctcctcggtagtgaagccgtccatcagatcgtcgtaaacgatcggctgaccgtttacgagaattttggcggccatcaggtgcatgccgcgctcgacgtccgtcaggctcttgttgttggttagctccatctgcttgcgtaccgtgataccaatctcagcgatctcggtgttggcgtcgagctggagccgccgccgaactgacaaattcggcttgcgattcagtgcttgctgtcccattattacaatccaaggttttgcctacgttcggccagcaagtcctcgccgcctactttgtagatgttgttgattacgtcgatttcgacgatctcctcgccgtcgatctccagtttgtagtactggacggaaacggtggactccagttcggtatcctccttggccttgaacgcgccgccggggagcgtcttggagtacccgcgtatgtacatcacgatgggcttctcgtccgtgatccccgtattgtcatactccgctttgctggagcggatcatcaagtccacgggtttaaggaaatttccgaacgctttctgcgcctcgttgtccggatacgtccatttgatcgtcgtttcgagtttatcgaacccgttgaaaaactcggccgaaccaatcatgcccatagccttgtaatcggtcataagggccgtaatggtcggggcggtgatctccgacgccagcccgtgcttgctggcattgttcacatagacgtttgcgtcgtaaacttttgcgatattcatggctattcgatggttgagagtttgttaatgtcgattttgtggtcgaacgtcatgcgctgcataggcacggcgggcgtccactcgttggaaaacgtgacgtgtccctgtgccagctcggtggccggattcttcgcagggtcgaaaaagcattgcccgtaaacgatcttaccttcggctgtcagccggttgtagtactggttcacggtgttgcgaaccaggtcgatgtcggcctgttttacctgcttaacgtcgataaactgggcgcaggccatcgtgatcgaacgcttcatgatcatcagtgaccggcgaacgcactcgaacgcgtcgggagtggtggtgccggggaacgctgcggtgtagtttccccattccacaatgccgttgccgtacatattgacaactgtcgtgatgccttgtgcgttcagcaggttggcctcacacgttttatctgagagcgcgaacgtgatgggcacgtcggtaccctcgatccccgtgtaggcgtggttcgacgatgacacatgccatccctctgttaaatcgaccttggcccgcaaacccgccgcgtaagctgacaccgggagcgtgaggtatctttcccctgggtcctcgacatccgggttatattccgggttcgcaacaaggacatgcgggaaaagaagcttttgcccggctttgagtgtggcaaagtcaccctccgcaccgcgcgactcaatggcttggttgaagccccagccgtcgggtgtgtcaatatatgccatcgcctcggttttctcagtaatgacaatcaactcctgcttcactgcatccaatgcggaatatcgcggtgcgatgtagatcatcggttcaaagccgtatttgttccctgcggtctcaaacagtttaagacctgtacgctcacccgtttcggaaaccgtacccacaatgtcggcgccggtgatctcggcggtggcatcctttactttgacgacaaacaccaaggcgctgccggcagtgctgtcttgcatgcggatcgccttaagtgcttcggggatggttccttttgtaccgaatgcggcatcgtccaccgcgctcttgcacaacgtgaggacgttggtgtcgcccttatccgctgtacccaccagcccgataaccgccgtaacgatgtcgttcacgggcaccgtgtcgctggtgacgttgatgtgctctataccatgtaaaaaatctgccatgtcataaaattgttataccgtttccggcgtggtttgtatttatccggctatttctttttgctgtcagccggttcgacagttgtcgcagccacctctttgatttggcggcgggctaccatcgcacgaaccgcgatgtcattctctggtaactcgacggcatcgccttttttcaacgcgtactcctttcgacctgcgccggccttaacgctgaaaacaacgtaaggacttactacctcgtactttttcatttttcagtaaattcgtttttgatttccttgatcgtcggcacactatcggggcggtctgcttcgacagtataggctgcaaatgaaaacgtaagcgcatactgccaatagttgtgcaggcccgaaacatagccgaacgaattaaagtaaatgggtgttttcgcacccagcatccgatgccccaaaagacgggatttcgccgcctcgtaaacatcaaaaagacccagttttccccgccggtttttcgcgcggatgaatagttcgcattgaacggttcccagttgagccacgacggccaactcctcgcgttcggcgaactccgtaccgtttaccagcacgaaaatctgcggtttctcggtctgacgcggcaactccagcgcctcgattttgggtaacggcttgacatcgacacccggcatctgcaacaacgtgaccagctcgtcctcatacctttcgtaaggggacatgctggcgtctgccttggttgtcattggttgctccatgatctattcttcgctttcggcgtgcggtgtcaaatgcgccacataggtttttccgtcaaatttggtgtccaccgcagtaatcaaataccgttttccacgtatttcgaggtattcggtcgtttcggcatccacggcttgcttcagcccgacgaaattaccttcgtaatactctgcggtggccgtgctcggtctatattcgtagccctcggagtctccgatctgcgtgggttcgctcgggtccttgaacaacgcccgtccgggaatatttccccgatttggggatagccaaacagcgggttcgcccataaggttggaaatggtcgaagatgctattttggccatcctgtcaaatcggttgttcatacggctcggaggttataacgttcaacttgaccaacaccgtggtatcgcctgcgtcggcagcctcccaagcgcatccgacagccttgttatcctcggccgttgccacaataccggaaccgtcggcagcagcatacaccttttggccctgcgtgattgcaccggtacctttggccaattcgtacacgcccgtaacgttcaacacgacggtttcgtccacggcgccgtcagtaacggcaacaccagcgacgtcaccgattacgcgtacatcaccgctcttgatcgcagtttctgcgactttatactcgatggtcttaccatcctggatgaagtttttcattgctctgtatttttagtttttgcttaaaataggggcaggcacgataaattccgcccctgcgggaagtttgccgttacgctatttccccgctgctttcacgatgccacgatagtcgatcgccgcagcaccgaaatcgccacggacggcatagtccatggagtcggttttgaactcctctgtgctgtccacacgcagaccctcgttgccctccaggtatgcgtagtagagactatccactgcatacgggtcggccatcagataccaagcttttggatcggtcaatcgcggctcgacgatcacgtcgaacgcaccggcgaaaacgttcacgtcctcgaacttgacgggcgttgtcgctgttaccagttttttggccatcatctcgttctcaggtgacacaatgaggtaacgtggcaccatgcgaataatctgtcccgcgatgtctttctgcttcatcatcgccgtctttgccgccgcaagactctcctcgcttaatgcgctgctggcacccgtgaggaggttgccgtgggtagcatcgaaaatccccttgccgtcggacatcttcacgttgtcggtcagcagaccccacacgaggtttccacggagcatatcccaatggcggacgaatgccgacgggatgatcgagaacacgcccaaatcatcgttgatgaacgcctgccgggtgtaactgatgccctcgccgaacgtctcgacgcggatctgctccttgctttccttaagcgttgtgtacttgatttctccaccctcggggatcttcttcatgccattggcgacaccggccgagtaaagaccgcgtgcacggaaatcgtccacgctggtctgtcgggcgattttgtcccaaaactccggtgcgaactcatactgtgcccgcaacatcttgttgatcacaccctcgaacaacagcggaaagtcgctggtgctgtgcgcacggttgaaaaccattttggccacttcggaacgatccaagcctcgggtgttgataccgcgctcggacaacagttcgcgcccgatctctaccatggtcatgccgcgaaattcgcgggcgccggcgtccaacgagaacttggacggataaatgcggtgcagcagtgcgttctccacggccatacgcttcttggtgccagcatccaagccggtcgcacggacactatggttaccgttcacgccgttttcctgacttcgtttagccagccgtcgcataatcgcggtgctgcactgctccacggtaagatcggtaccgaccagtgccagcgcgtaatcggcggaaaggccagcggcacgggccatttgctggatcgcttgcgttcgcttgcggttctcttctgtctgttccgttcctccggtagcttcagttaccgcagctgcggcatctttagcagctgcggctgcatcctcggctgcggctgctgcatcctcggccgctgcaactacatcctcgttcgttttggcttcgtcggagtcagtcggcgtgacctcttcctcaatcagtgtgagtgtaatggtatcgcccacttcgccatcggaaagggcaacgcccttaacgccatcaacggttacgatgtctccctgctttacgggatcgccctcgacgacgtactccatggtcttacctgtttctgttgctctcgtttttttcatgttggtggtggtatttgtgattcgtttgtttatgatttcgaccggatgctgctgttgtcctgtgcggatgccgctgtcgatgtcggcgggtactggagcgagggaaatttcgatcggcatccagtcggtagcccggtagataggccgtgcaccgtttgggcgctcctcgcgctcgaacttgtagatttcgtagccgaccgagatccctttgacgatcccgtccaccacatcctggaacagtccggccacctcgggacggctggagaaacgaacgcgagcgcaaagctggcgcgattcgttgatccacaccttgaccgtgcgaccgacttggctgtgcaccgagtacgaattatgacagtccaaaagcggaagcccctgatttgcgcggtccattcgaacggcggatgcttcgcagaccagcatttcgtcgtagtcttcgtcccagctgaagcgcgtaaccattttttcggtcgcgcaaacgacatctacctcgcgggcctcctggtcgatggtcgtaggctgcacgagcgcccgcccgtacagcacgcccatggtgcggttattcgtttcctgttttgccattgctattttctttttggacgaccgtagcggcggtattcacgctgtcaatggtaatacccaactcggccagccggtcgatgtcctgtttatattctttgaaaaactcctcgggttcgcgccccatctctcggatcgtctcgctgatcgtcgcaagaccggccttgatcctatcgacctgtgcggcggtctcgcgctgcggatcgagctgctgaatgcgaggtgccgtccagtcggcggatatatatcgggacaactctcccttgatcatacacgcgctgataaaccaattccacacgggggcacaaatctgcggtacgatcataaaatactgccagcttttgaagttggccgtaacgtcgattttcgccatgcgccccgaggtaaaattcacacggctataatccatcgtcagcatttcgtaggtgatgccatagccagcggccattccctgcaatatgcggctggcgtaagcatcgtaatcggacacgctgggcggattggcgaactctaccgattcggcagctccgaggtgttcgacgatgccaggctccaagcgctcgatacctatcgcaccatcctcgccaccgtcatcttccgaccccaatacaaatgcggcgaagcacgcggccaccttttgctttacgagctgggcatcctcgtagtcggaaaaatcgctcgttttcataaacgccgacactccgatcggcaagcctcggacctgtccaggccgcaacacctcgaaagcatgtagcacatcctccttggggtaaaacttgctggcaagcgccggtgcaacgataaagctgtcgccggggtggtaatcaaaaagccagtaaccgagcaggcgcccctctttgctgaattgaaccccaagccgacaataacccatatcgttgctgccatttcgggtgtggtcgagctggtcgccctccaaaacttgcaactggagcggtagcgggttgttgtcgtcgggcatgacccagcgtctcaaaatcaacacttcgccactctcagcgatggaccgcatcgctaattcctgcaacccgtaaaatgtcgttttgccataccagtcgcaggcggtcgaattggcccatttgctccaaagtcgttttacgagttggcaagttgccaaatcggcgtcaggcgccggctggatgccatcgccgatcgtgtgcttggtgatcgcttcgacagcccgccgcgcccatccgttgttacggaccatattacgggaacgatcccgcaacgtaaccagcgcggccgatacttcgctattgacactcgtggactttgccaaccggaacgccttgccgcgacggcctttgtcggccgcctcataggcccgttttttacggctacgcgatatttcaaatgaaattctcatcttttgctgaaatagcctcggtcaatacaagcgaggcgacgacggcgcaagcggcgttccggaaacaactcctcctcaatcattcgaaccaaatctttcatctcggcaagcgaccgatagctcacggttttgtcgccgtaggttatggttgtcgcaccggtggcgatggcctccttgagcgcggtatattgttcgattgtaaaagacatggcagcgtaacgatttgcaacgaatttatgagaggtgttttacattcacaataccacgcgaaaaggtttaccgagttctcggtaaaccttttctaaatataccgacatctcggtatatcaatcatcccaaaaactgccacctcgacggcgcccggtgctttcgtcgttacgagcgtctctctttttggcggttgcaccacccatctgcgccaaacgctgtgggttcaaccgatccagcccgaggatagccgcagcagcccgagcatagacacgacagtcaagcggttcgttgcgctcgtaccgcttcacccattgcaactttcggtacccccgcaccaccttgacaacctgctcctcggcggtaaggccacggaaatagtgttcgtcatattcgggaaaatggcaatagttcggcggagggatgccgttctcgtccttttccagccgcaggtgggcgtataactccgttttgaggaatgacacgccgatattccactggcgcatctttccgacctttttacccgccttggtgatgtccacctgcttgggtggtgaaaacgccatgccgaggtgatcctgacccttgatcggtatgacgcgatcaccgacgaaccggcggcaaaaggtatggacgtgcgtcgtgttgtagccggtatccaccgccatcattcggataggaaactccatcccgtccttgcgcggccaccgttcacccacgacggctgccaaatcgtcccatacggcggttccggccgtgtccccctcgattacgcggtagtcgatcgaatagctgcgtttgtcggcacaccagccgacaatctctaactccaggcggtcgcgctgtacatcgacaccggcggtgaggaagcacacatcggcgggcacatggttggttttgtactgctcgcggcggttgtaaagatttttgtacggcggcgcctcgcccttttccgcccacgtctgcccgagggttgtattcacgaaaacctttaatttgctcgggttctccttggccgcaatgaaatctcgcgcgatctgttcccagctatgccacccgtagggcgaatagagactattaagatggaagccaatcacatcgtgatttacattttccggcttggcgggtacccactggccgtttgctaacatggtgatcttgtgccgctcggcgatcaattcgccgcaatggttgcacttgtattttgctgtttggggcttgccctcctcccacttgagatttgcgaataccagcggctgcataacgccgcagtgcgggcacgggacatgatagtagttttgatcggtttccaaaaattcccgttcgattgccgaaagtccctcgatggtgggcgtactcaacatgaaaattttatggtttggaaaggttcgagtacgggcgatcgccaagtcgatcggcgatccctcgccgtccaagtcctgcgggtaagcgtccacctcgtctaaaatcaaattccggatagggacagaccgtaaccccgctgcgctgttggcgccgaccatcagcagcagaccgccgggaaaattcttttgcgtgatcgtgttgttgctgtcgcggctcttggccggagccacgcgctgcttcagttcggggcaattctcgatcagcgggtcgatgcgtcccttggacaaccgatcgaccattttgtcggtcggctgtacgaacatggtgggcgccggcgcgatgtgcatagcatagcctacgaagttgctggcgccctcggttcctccgatctgcgcggcctttacgaagacaattttgcggtgcgagtcgtgaacgctcaagcaatccatgatgtcgcgcaggtagggggtgcggctcgtccggtattggcccgattcggcagagctgaccggcgacaaaaaccggtatttgtccgcccattgcgacaccgtgatccggtcgagcggtcgtaagccctggaaaaacttggttatctcgttgaaaatggctgtcattggtcgattcttgtttgaaaatccgcgagcttctgcaacgcatcggcgatcgcgtcgtatatcgtgttgtgaacgattgcccgattgtcttccgccataaccacgtccgttattcggtcggggattgcgagcaatgtgtcgcgcaattccttgccggcggcgaaaagttgggcatttatgcgctcgcgcgacaccagcgcaccctctttttcctgtaattccagctcggcgatcctggctttggcgattttttcctgtaattgggcgtcctcgtaggtcatcgtagcagttgccacagccttggccgtcggttccggctcgatcaccgctttatcaaaggttttgatgtagcccgccagcgcgttgcggaccttgcgctggttggggtgcgccgagttcagcgacttataccagcatacggcggcctgttgtgggttcaggtaatacggcgaagtcgcggacgtcccgacgacatccgcgaaattgtccggtatatatccgcgctttatggccgctgttatggtcttggcgcttattccggttgtttcttcgaaatcagatattttaacccaacctttgggcgcttttttcttcattcgtatctgcttgctacctgctatgataattttttcctgctgactggcgaaaaaacgcgatgccgactacccccgatgtagggaccaggaagaacctataaaatcattcttgttcgtaccttaccggatcgggtttctcaaatccggttttatctccgcattcgggacattctacataccacatcgttacgcgatctcttggatcgaaaaaggtttcatccacatcggcggcgccatactcaaattgacatccgcaagggcatttccgtacatatatcgccatcttactactgtttccgtgctgtattatccgtttcatgtcatccgttttttgccgcgattttgttcacgcaactggttagtattccgtggacgcgggctgttacctcgttgcccataaactccgcaacgtccgtccgcacgtccggcgaaatgcccattgtgaacggcgaggccgtcatcagttctgtgatgcgtatcttaccgctggccgtcttttctcgcccgggcacgaagcctatacgtttttgatagcggccgcgagaaaacacccctttgtgcccgctggacatggtcgcgacaaaggcgtggcggatcatggttgtcttgcccttgtggattgccaccgaaatcgaggatcccgattgctttggcttgaatgcgataaccggtagccggttttcgtttatcttgatgccaccgtacaagctgccgctgttagccttgggtgacactaccgcctggcgtgataggtatttctgcgatatattgtaccgctcttttatccgcttgtttatgcggggtatcgagcgcgtaagcgcactattgacgccttgcgctgtgccgcgtaatatttcattgggggatagcttgctgcgaaactcgttttgtattcgctctacctcgtcgcgcttttcctgtgtgatcttgatctccataacgtcagattattgcaggggagcgtccgctgtgtgggtggccgccttacctcgttcgtattctttcagtttctcgtcgattttgaggtacaaatccaccggctggggcgtccggcgttttagatcctcataccactgtcgcgatacgccggcctcgcggcacaacttcgaaatggatacattagccgcgttcgcccgtcgtcggatgtcgttcgccaagtctttgtcgctttttttcataatccaaaaaaaaattataaatacattgatttcaacgcattcctgcacctgccatctctttcggcccgcagatgcaactccgccatgttctgctcgacatactcctgcacattcgcgggacacttgccactctcatacatggccagtagatactcggcagggactttcgctattacttcgcccttgtagctgtcgaatggcatacggtcggccgtcttctgcttccgatcggcagcctcggtgtccctgcgttgctcgatggcgggcttgtgctcctcaatgtaccgcgctacactttccgaacatttgccgttctcatggagccatagcaggtaatcggcggggacgcccgacatgggacgccccttgtatttgccgtatggcatggcgctggtgtctgtcagcctccacatagtcaatagcgtttcccgtgcttatatcctcggccctcgttgtactgcattttcagcagaacgtgcatttcgagattgatgccgagtgcggtggataaatcaagcaggcgaatggtcgcgtcggccagctcgtcctcgaacgtgtctttaacgtgtacctcgaacttttcacggaacggaaagatttcacagggttccttatcgaaaaaagccgataagtcggcccgtttgttcttacgatcggcttccagcgcctcggcgagttccgaaacggtcagcattaaagcgcgggggatgtcgatcggttcatcgtggaaccctttcgctttggcggtttcaaatgcgcgtcgccccaattctttgagtgttaaatttcccatgattatttcatttttgaaaggtttttactcacataatccgtaaaagctcatacaactggtcgccgtatcgtcgtcgaacaaactgcccgtcgcgttctgccattggacgtagcgcacgacatcgtttattgtcggatatttctcgccgctggtaatcgcgtgggcggggattttacccggtccaaaaaacgatgacttcaggtcatgctccagcgtggtaatctgctcgatgcgatccggagattggcgggaaattcccgctggctcgccatgacgcacggccagcaccctacacgtttatagcccatcgtgtagagcggattgggttcaagccccgccgagaggatgtagtcaatcacctgctgcgccgaccaatcgaatacgggacgcagtagatcgtcagcgtattgctttcggaacacccgcacgtcgtgaccgcgataggtgtgcatctttggtttgcccgctttatcataaccgtatggctcgaaatagtacttaaagtacgtgcattgctttgacatagccgcacggttcggagattccgccgcgcgtatgccttggatcatcagcatattatcctgtacgttgtcgagcacatagtcgatgcacggcttggttttcaactcttgggcacagaatcgggcacgggtggacggccaacgctttttctgcttggccaaaccgaccatcccatcatacttgggcgacttgagcgttacgaggtcgaggtttagccggtcggcgatgcgattgatgtactcgtaggtcagtggatgctcccaacccgtatcgcagaacacggtggtaaagttcttggtaatatgctcgcgcacccacaacagcgccgcaaggctatcctttcctccggaaaatgttacgattattttcatctaccaaagtgttttatacagttacagatcgtgattgtcggattggcccattgccgttgcaaccggctcccattgtttcgccagccattcagcgatcggtatgtcccaggtgaacgttacagaaacgtgcacctcgtccgcttcgtcgaaaaaggacggagtttcgcggatacgtaccagctcgtcggttggcgtagcattcgtcttggttgggaatactcgtattatccgttttttcatatccatttcagaataatttttgctgcatttggtgatcgatcaatcttcaataacccgcacgtaggtatcgtttatagttcgacctatctctatcaacctcaacgcgaccatttcctccaatacggcacgaaaagcggtgagggattgggaaaaccgcgttttcagcataagtccgtcgcgtatgaccagagcgtcggcgggcatcctgtttgtagtccggcgggtgcgttgtacctcgcggacgtggcgccgtatctcggcgtgcaaagggttggctggttccatttattgcccgcttaatttttcaacgatccgcatctctcgttcggataactcccacactatagcctcttttttcaccgctgctctttcggcggcaactctttcggcggcaactctttcggcggcaactctttcggcggcggtatgcgagattaaaaaaccggagccgtaaatcgctttcccgtgctttttttggcaatcgagtgcagagcggtgcagcatttcccgcttgtctatctttacctcacccttgtttttcacgatgtacgctacatctgaaaccgtcagcacgcagtccgggtatttgtatttcggcaattccactttcggcgccgagcaaatggcgtcgatcccctcatatagcacaggatcacctattacaccggcttcgccgaacatattggacaaaaaagatgtatttacttttgccccgttttcgtaaacgatatcggcgccgcatacgatccgtgtacagtcaaggtcagcgctgaacaatgtcagatgcggggcaaacaggaaaaacttgatccctcgtttcagatagaaccggacaatttgagcgatgatcgaaaagggcgggttgtcgatcaccacgcaattatcgggatagaccaggctctcgtaatcaccacccggatagaacgggcggacaacggtcattccgtcgatatcgcaatgatcggctacatattgcaaaacatagtcgtacaccgctggaggtgtatagcagtcgtcggtcgttttcttgggcttgaatttttccacaaagccctcgtaatcgttgaaaagccctttttgcgactttccgcgattcgtgaacacgtgctcctcttggccgaataaatttatacttttcatatcatgctgcattttcaaaatccaaaatcatacgccccagtgcttcgcagatcacgcgggccattgtaacctcaacagcgttgccgatgaacttcttctgctcggcctgtgtgcctaccagcttgtagttggcggggaaacccatgatgcgtttcagttcgggaatcttcaacattcgcatcttcacatcgaccagcccgtacagcgccatgaactcctttatctgcaccacgatcgggctgtctgtggtatatacctcgtagatcagcgtatcgccctcgcggcggataaacggagcgacctgctgaccctcgcgctccgttgtgacgatgtagggcgatattttgtccatgcgggcgatcaacgtaaagcacggcgtttcgatgctgccacacttggacgtgtattgcggattcagcagatagcgacccttgcgggcggggatcgccaggcgacacgtaacgaggtggtgcttcggagtcgtcgttaccgtaccggccggctcctcgacagataccgctcctccgttaccgtattgcatattcagaaaccgaggctgcaccagttggaaccggtcttttgtcgttacggtcggccccggtgcctcgactggcgagttgtatccgttaccatagtacgccgtcagaaagttgccggagaccagcgcgtgatgatctaccgttgtgatggcgtgcgccggcccgtcgatgctgatggcacggtcggccggtgatccgctgaaatgcttggcaaggaaacacgcctttgccacgccgagcctgctctgcaccgcaaccgtcgggcatggatcgtcgatgcctggcgcgacgtatttgccgctttggctcatggagttgtatttgaccatgaacgcctctttgccaccggcgacgaacttcaccagcccggcgtgtatgcgctcgaaggttgcatccaccagcggctttttgcggccgaatatgctggcgccctcgtcgtgcaagtccagcacgtcacgaaccgggcgccacttagcgcgggcgtcgaacaagttgggggcgggcttcttggcatgggtgggcgtcgggaaaacgatgggcagccggccggcggcgaaaatcccgaagaaccggcggcgggaggtgtaggccccgaagtccgccgaatcgaggatgcggtggtcgaaccgatagcctccgtccgcgcaaatgcgatccacccaccggcggtaatgctcgccgcgatgggcggcatcgggcacccacacgggggcgatggtgcggcgcttgtgtttgccggtgccctcggtctttatcgccagtggacagtattcgccatgaccggccgatgcctcgacgactttcaccacgagcggcccccacgtcatgaactccttgacgttctcgatttggatgtagtcgggccgcagtgcgtcgatgtatcggaaaaggtgctcggcaagcgtgcggctgtcggcgtcgcggctttggccgcccttagcgatcgagaagttggtgcactccagcgacgcccacaacaccacgcgggcggcagggtattgtttccgcatggcttcgacatgggccagcatccggtcgaggttcaacgtgcggatgtcttcgacaaagtgcagcgcgtcgggatggttggccgcgtgcgaagcgatcgcgttggcatcgtgattgacgcacgcgatcaccttggcgacctgctcgccgtgcaaccgtgccgcctcaacgcctgtagatgttccaccggcgccgcaaaagaggtctatgtacagaaagcggatcatagcgtaatgctttcaaatatccccagctctttactgcggcgtctgttctctatttcgatatattggggatttaattcgaaaccgatagcattgcggccgagtttattggccacgatgcgcgtggtgccggagccgttgaacgggtcgagtacgaggccaccggcgggacacccggcaaggatgcacggcacgatcaaatcctcggggaacgtggcgaaatgggcctctttgaacggctgcgggggaactgtccacacgcttcgtttgttgcgcgtcgttgaagcttccggcgctatctcggtgtattcaatcgcttccgcacgaccggagcgatggaatgatccgtggccgcctttccccgtgtcccatcctgccggcttgcgctgccggttcttgccgacgttcggatggttgatcaggttcttgccatcctcgaatttcgatccgttccacccggtcgctggctccttgatcgcctcggcatcaaagtaatagcgggccgatttgctgaaaaggaaaatatactcgtgcgccttggtgcagcgatccgtcacgctctcgggcatcgggttcggcttgtgccaaataatgtcctgacgcaagtaccagccatcagtacgtagggcgaacgccagcatccacgggatcccgatcaagtccttgggtttgacatcgtcagcaccgcggttactaccggcatagctatcgcccatattcacccacaacgtcccctccggcttgagtactctccacagttcgcggaataccgtcacaagatgatcgatgaaaacctccggcgtttcttccagcccgatctgaccgtctacaccgtagtcgcgcagcccgtagtacggcggcgaagtgacgatgcagtccacgcaaccgtccggcagcagtcgggccgccgcaagcgcatccatgttgtaggtggtattgatctgcatagctttcgttttatcggtttgaagtcagccgagccaccagcgcggcgcattcgtcttttgtgcggggcaactcgatcgtggtggtgcggccaaggtcggcaaacaggcgcttcagcatcttgatgcggagtttgccctgctgggtggccatgcccttggtgtcgatcgccatgtcgtaatccggcaggtagaagtccagcgtgtaggtgatcgcccgaacgttctccccgttgtaggtgaacggctcttgcagggtgtagcgcttttgaaacagaaagcctattccgtgcgatttcagcagatcgtgcatgtagcgttcgagtcggctgtcgaagattaccccgttttcctctgttttcgtcgcgtttaagacctttcgattgccgatcggtgtagttatactatttcgggggagatcgccggaaataagccgtctaaattcgcttgcggtcatcgtgtcggtgttgttggtcgatcttcgtctcatgcttgtattgcggctatgtcgattttacgcatccagtacttcgtgccgtcgggcattgcgaggaactggaaatcgtcccacgccccccggcctccgtccacctcggcgatcacctcgttgtacgtgtatttgcggcccgtgtcggctttgcggctcttgatgatgatgtcgtgagccacgaacgaggcaaacgtcgagtatgcggatttgttcctgtacgcccctttgttgtccattgccgcgatgatgcggtttatatcctcggcactgaacttggccagaatgtcgcgggcctgctcctcggtgatcggttcggccatcgctgcgatttcgggataggccgaatcgagccagtcgaggaactcggcggtttggttttcccccacaccccctttccatgtagggattactgtgtgtgtattactcttactgttactcttactcttaaaaaaaggaaattcgccgataattgacgaaaaaccctgtttccgcctgttttcggcgtcgaaaactcccgccggctctgttttttcaacattttcagcgtcgaaaatcatttcatttttggggtttcgctcctttttcgttgtgttttcgcttgttttcggctcattttcggcgtcgataatttccgcgccccctgcgtctattttgctttttgccttattatcaaggaaaagcaaatcgcgctcgcgctttaatagcaaaggtttcaggccgttacggtgttcggcggagaaaataaacccatccccgatttccaacaggccgattttgacagcatattctactatcgctatcagctcctccggttcaacgtcgtaatcggccgccagcaactcgacggtcacatcgtcccacttgatgcggaacaaatcgctactggtcagcgtttcctgcaaataagtccataccgcataccccaagtgtgaaaacttgcgccgaatggcctttaccatcggtttgtttcgttcgtttacgtcgtgcgggaaccagtccgcatttagttttctcggtcttgccataatttcccaaccttaaattttcttactcatttagttttcggaatccaattcccacagtaatcggagcagtgacgagcttcgaaatagctttcggggacatcgtggtgttcgcattcaccatacccgttggcgtcttcatacttgaagcaattgcacgatccgcacaccttggttccgttctccgtcaccctgttgtattccgtatcgatgtcggcggagtatccggggcatgtgtctggcttattcattatcgtgatatcttaagaaattaaaaaaatccgtacatttgcatccgctctcagtattgcctcgctcgccacatatttgcaagcaaaacgcatcgttccctgcacgtgctttcgagactggcggacaaatagagcgggtcatatagacatccgatccgcttggcgacccacagcggtacccgcccgtcgccgatgtacgtcgccatgatcgcatcgcacagctcgcattcgtcgtgcttgatgcaccgatcgcaattctcggcgtcccaggccgccaactcgctgcggctgccaaacgtccttacgggcgtgtctttttcaaaggggtggttgttccattccataatcggggatattagtttgccaaatacagccgtacacggccatcgatgtaaaactggatctgcagccccagcgcctccaatacatccgcataattctcgcggatatagtgggctgcccgagggtctgaaacataatcgcgataacggatcacgacacggcgcaaatctcgcacattgtcggtattaacaatagcattgaacgaggaggtgcaatacttgtaaaatcggcgatgtacctctttcgccgcgtccttcatttgctcgaaagtctgttccatttcatacggtttttataggtgatccttttttccgcccatccactcgaacggatcgggcatacagtccagttttgcgcggtcatttaccggtgactttacacgacgatgcaacccttgccgatatatcatcatctctatgctgcgaaccgatcgtccgtactcctcggcgattgcctgcacatcctcgccggacagatagcgggcgattacgtcctgcacctcgaatttgtcccatcgtctgtacatctttcccatcgctgcggattattcgtgattgtcgaaccagctggcgcggttgctttgcgaggcgaccagctctatacgttctgccagcacacggcacttactgttgcgggttccgtctttgattatctcgatcagcccctcggcagcccaccgatcgaccgtaccacggccgaatttccggtagcattgtgtgagggtgtagtatttcgtatcgtcggccagctccgcccgggccatacgatacccggcagcgtaggcggcggctatctgctgcaaatgcagtcggtcgagaggttcgtggttcatggtattacgatttacgggttactttgataacgccggttcccctcaacgcggagaccgacaatttgatgtttttacccttgcagtagcggcaggcgttggcccgcacgctcgactcggtaaactcggcaacgctgaactcgacgctttcgccaagcctcaacgcggcaaaggtttcggaaaagtttacagttcgaactaattcggccataattgaaaatctgtttatgtttcgctcccgcgccggtatcgctccgggtaaccgcttgacggttcgcgggaaaacacttaactttaggcgttcaactctaaaatttaagtgctatgaaaagtttcatcgacaaatttcgtgaggagcaagaaagcgcccttacagtcgcacaactcgaagaaataagccgcaataaatggttgtcaatcattgcccttattgtcagcatcgccgcgctcatcgtggccatcttcaaataatttcgagtactcccggcagcagattgcagcaatctgatcggcatgcttggttataacctcttgaaacccgatcggctcgacgcgtttttcaaggttggtaatgcggccgtgtatgatcgtgatacgctcgttcagcatgtcgatttccgtctcaatggcaacgcgctttactaaatggtcggcctcttctctggtcattttgtccaagcgggtggtgtagaaaatcgtggcgatgctcgcgccgacgatcgcagtagcaatggcgataataatcactggtgtcatggctattcgttttttaggagttcggggttgtcgtggatgttgccaatgacttcttttccaaacttataaatccaatcctgatccaatcttaaataacataattcctttctatcgaccaaggcccccataaaagctgcgttgccggtatggtaaaagattctatgagggcgagttttatcctcggacaatggagagcgtatcacatccccctcgtaaatctctttaccgtgttcgtctttcaaccccgtgtactggccgacggtggcgggatcgacccgaacccagtattttagttcttcgctccaaatgagggttgccttgttgcgcgtatcgaaccacaaggaaccgaatacccatttcctttctgcgatacctatacctctgtacctaatctctctcataatctcgtttatttgattatatttgtaattactattgtaatgacaatgcaaatatctaaataattatttagaaaaacaaaataattatattaaaatttatgacaacaaaagaaaaaataaaatattatattgatagtaagggaattagcaagaacaaattttatactataaccggactatctacatcttttttggatagtggaaacactattggcgtcgataaggcaaaaataattatagagaaatttccggatttaagtttagagtggcttgtgcttgaccgaggcccaatgctcgcaaataataaagtccctgaagaaaaaaatgataaaaattcggaacgaatcgataaattattggatattgtcgcctcccagcaaaagacgatcgaattattagcccaaaaaggggctgcggcggatgtgcagggtgttgctggcaaggcggtacaaggataaaacaacccgaacgatttatactgacacccgattatccgatcaaagacgcggcccggcctcacaacctcgacacgaccgccacgacaaattagttcttcgctccaaatgagggttgccttgttgcgcgtatcgaaccacaaggaaccgaatacccatttcctttctgcgatacctatacctctgtacctaatctctctcataatctcgtttatttgattatatttgtaattactattgtaatgacaatgcaaatatgaaaagaatatttatcacatgcaaataatttgataaaaatatttttcaataaatatgttaaaggataggttagatttgataatcaaagagttgggattatctgggaggcaatttgaaaaggagtgtggcctaccttccggctcgtattcaagtatatcggatggggttggcgcgaacaaattgaagcaaatatttatcaaatatccgcaaatctcattggactgggtaattatgggaaccgggcaaatgttcaaaaataacgatgctccatcagagaaaaatgataaaaattcggaacgaatcgataaattattggatattgtcgcttcccagcaaaagacgattgaattattagcccaaaaaggggctgcggtggatgtgcagggtgttgctggcaaggcggtacaaggataaaacaacccgaacgatttatactgacacccgattatccgatcaaagacgtggcccgacctcacaacctcaacacaaccgccacgacaaaacggattacaaaactggatatattattgtttcacgctttcgcagaataatccaatgctatggttagctttagaaaaagaattaaaattgctccgggcgtaaatttgaatttaagtaaaggaggcattagcacctcgtttggtgtaaaaggcgcatccgttagtgttggtaaaagaggagtatatataaataatggtttgccgggcacagggatttataaacgcacaaaaatatcccgctcttcaacaaagaaaagtcatacactccccgttgaaataggcgagacaacaaatacccagaatttatcggatgcccaagtcctccttaatgatctgcgttccaaattggaaaagttggaattgagggataaaaatgtcgttatagagactgaaactttcaatatgtaccttttcgggacaataaggaatattttgaaagatatgggtgtaaattttcaaacccttgtaaaaaaatcaacaaattgtgttttggtcggcgataaaagaagaccatccaaatatacgcgtctaaaaatagagacttacaggcaagaggggcaaaaaatatcgttaatgaaaatatcggttcttgacaccccaacgatcagcacaaccataaccgaaataccgactaacatcactcaaaagaatatagtgcaaaataaaaaactccaaaaaatcatccgagtactttggtgtattttaggatttatattcctgattatattgttagccacaacaacataataaaaaatccccggagtgatccggggtgtcgttttccctctatctttgccgatgttgtcctttcgacctcaacatgaatatcaaatatacatatgacgcagaaacaagccatacaattatttgaagagcgcaaggtgcgcaccgtatgggatgaccaaacggaggagtggtatttttcgatcgtggatgtcgtcggtgtattgaccgacagcgtgaatcctacggactatatcaaaaagatgaagaagcgcgatccggagctatccaaagggtggggacaaattgtcacccccctttccgtgcagactgctggaggtcgccaacgggtgaactgcgccacgacgcagggtatgttccggatcatccagtcaatcccctcgccgaaagcggagccgttcaaacagtggatggcgcaggtggctgccgaccgtctcgatcagatgcaggatccggaactgtcgattcagcaagcaatggtcgattacaagcgattggggtattcggataattggatcaaccagcgtctgaaagcgatcgaggttcgtaaagacctgaccgacgcgtggaaaaagcgaggggtgcaggagggccagcaatttgccacactgactgacataatcacgaatgtgtggtctggcttcaccacccgtgaatacaaggcatataaagggttgcggaaagaaaacttgcgggataatatgaccaacacagaactcatcctcaacatgcttgcggaggcttcgacaaaggacataaccgaagcaaccgaccctcggacgcttgcagcacacaaagcggtcgcgcgacaaggcggcacaattgcccgcaatgcccggctggaactcgaagcaagaaccggccgcaaggtggtttctccgttgaatgcacatcaggtattacaaatcgagaagacggacgaggcggaattgcagaccgaagatgaagaataaaaaagcccccggagtaatccgggggctgccgtttccaaataggtcgtcgtcaaacaataactaccggtaacagcaattcgtcacaacacaatcgaatagaacggcgccgcgaatttgtgcaacgcctcgataatcttacgacgttgtgccgggcgtggtttacttttatcattggcataacgtcccaactgggcggccggaatgccggtcaattccgccaatttagtatccttgatatactctcgtgcatatttcaatgcgctaaccgcgtcatactccagttcgatctcatacgctccgtccaaatatgccttgtagggaaaacccatctctttggccgttttgatatagagtgcaacgccctctttcatgtcggcaacggccgccttgacggtatcgcccattccagcaaacatatccttttccatcatggccgaaatcgttccgtccgatgcccattcgatgataacctttaccttttccataaatcgtgtgtatttatttcgtttccggttgcccggggagggggcttatttcagccccatctcccggataaaccgccgtgctattcctgaacccatttctttcgaaccgtgaaaaggaaccgaaaccgttttgccatccttttcataaattacgtggctccctgcttgtcggatagatcgccatccgttttttaggattaggcggtgcaactcacttgatttcatattaccctttgttattgtttgacagtacaaagataatgcaaaatatattattatccaaataaatagtatattattttatacttttatagataataattagtatttactttttacgtagtccaaaacaatgcggttattcgtgtcgttgcgcgtgaaccggcggtgaatgtacccccgcgtggtcttaaggcttttgccgctttcgaagccggaagccaccccaacgtgattaagcgccagcgcaatgtcagtttccgaaatcccgcactcctcggaggcaagagtagcccatgtgtggcgcatataataagtacttaaaggcacatcgattcccaagtgcgcggcaagttgtttgcagcccgcgtttacgttgtggttaaagtcccggaaattagcgtacattttataaaatgagaacaaccgccgtttgtcgggatctcggtacttttcaatcagtgacagcgcctccggttcgatcttcacggacatcaacgcttcgtctttacgacggttagccgtcttttgccggtggtagatgatccgatcgtcttcgagttcgacatcggcaccgaacaagtcggcggtgttcatggccaacaagtagaacgagagcgccagcacgtcccgtgccagctgcatacgcttacccgggacagtctcggcgtttagtatctttacgagatcctcgatgcacaaatcccgcttttcgggttcttctttgacctcgacctgtaatttcttactcccgaacggtcggtgggtgattagaaccgtttcggcatcctcgtcgttgtagtggtcgcatgccgcattgaatagggtgtggatgtcggccaaataatcctttaccgtttgcgccttgcacccggggcgccgcaccgtaacctcttttccgtgctggtttgtccgcgtctgttcgtgcggtttctgcatatactcaacgaatccctgcaaattctttacgttgatctccttgacgaatacgatagaacgcccgaaatagtcggttaggttgcgaataacggcctcgaatcgtccagcggtaccatcccgtccctcggccttcaacgcctgaatatggttatcgcaaaatgcaatgaagtcaatgcccacgccgccctccgttgccttttgtgattcgatatactttaccaggtcggccgcagaaaatcggctcaagtccgtgcccagtcctttggccagcatatcctcgtatttcgatatgtcatttaacaatcctttcaaaattgttgtatctttgatcccggaaaaatcaggctttacctgcttccgactgacatatacgccggtagatatttttcttacttcccttttatgggtaaggcggatggataccggaaatttaccgtcccgccgctcgttcttctctctgatctcgatagaaaatgtaggcatacactttgaattttggacaaacaatggacaaacaaagctacatatttttaccgaaatgtgtgtaaaagtgtgtaaaataagacgggcgtagaaggttgattttatggcaaatgcgctgtatggtagatttttaggggattttacattgaaattatagacttgcatggcatgcaagaggtcacgagttcgagcctcgtattctccaccaaacaagaaacagccgcatgatttcatgcggctgtttcttgtttgatagtatgtcttttatgggcggagttcggacgcttccgtcggaagttttcccggctgatcccgagggtcagtttttcaggtattctactgccgccagaccgtcgttgaggggatagaggccgatgctcagcgatttgtcttcgctttcatatacgtacattctttgtcccggacggtattcgaggtagatgtacagctgcgagaggtaggtgtgcaggtcgtcgatgtacaggtctgaaagtatcgatccgcaggaatatactttgttgtcttcgaatatatatatgtactctttgacgatgcccttgccttcgaaatacagcgaggtttccgatgctccgctgtaggcgtagggcaccgaagctttcacttcctcccgtgtcttgccgtacatgaatacgggagcttcgtattccctcaaagtgggaggtgtgttgtccttgttctcatcgtcgttgcatcccgcgaatcccagcattacggccgcgaaagcgaatagtaagaattttttcatagcgaaaagataaacggtttgaaataaaggtttgatcgattgtaaatgagataaattattcttttacaatatgggtgcgccgccggatccctgaatatggtgtcgaggatatccggtgatcgtctatttttgccggaaatagatctggatcggtacccccgagaaatcccactcttcccgaatcttattctccaggaagcggcggtagggatccttgatatattggggcagattgacgaagcaggcgaactggggcgtgggtgtcggcagttgcatcacgtatttgattttgatgtatttgcctttggtcgccgggggcggataattttcgatgatcggcagcaggtagtcgttcagcgccgaggtggccacgcgccgcttgcggttttcgtaaacccggatggcggtctggagcacttcgaggatgcgctgtttgttgagtaccgaggtgaagatgatcggaatgtcgttgaagggcgccagtttttttgccaggacctctttccactccttcatcgtgttgttgcctttttccaccagatcccatttattgactacgatcacgcaccctttgcggttgcggacgatcaggttatggatgttcaggtcctgggattcgaggccttgctgcgcatcgagcatcagaatacagacgtcggactcctcgatggcgcggatcgagcgcatcacggagtagaattcgaggtcttcggtcaccttgccttttttgcgcatgccggccgtatcgaccaggtagaaatcgagtccgtacttgttgtagcgcgagtgaatggcgtcgcgcgtggtgccggcgatcggcgtgacgatgttgcgttcttcgcccagcagggcgttggtgagcgacgacttgcccacgttcggacggcctacgatggtgatgcggggcagctcttcctcctcgttcttggtttccgggggcaggtcgcgcacgatttcgtccatcaggtcgcccgtgccgctgccgctcatcgagctgatgcagtagggttctcccagtcccagcgaataaaattcgtgcgaggagtagatcaggtcgtagttatcgaccttgttgcagaccagcagcacttttttcgaagtgcgcctcaggatgtcggccatcatctgatcgagatccgtgatgcccgtattgacttcgaccaggaacaggatgacgtccgcctcttcgatggcgagcatcacctgacggcggatgtcgtcttcgaaaatgtcgtccgaattgaccgaatagccgccggtgtcgatcaccgaaaattcacgtccgttccagtcggttttgccgtaatggcggtcgcgtgtcgtgcctgccgtcgcatcgacgatggctttgcgctgcccgaccaggcggttgaacagtgtgcttttgcccacgttcgggcgtcctacgatcgctacaagactcataatgttattttacgtttatgtttatgcgaaacgaattatgcggtgcgggccgagagcgaggccgaatttattcggacatcgatggatgcggccggtctaaaacaaggtcaaagatagtgcaagttacgggtaaaaccaaacccggtgtcgattttacccgattgtcggtgcataaggggtgggggccggatgtgcacatcttatccttttccgatcgggagatgcggcttccgaaggttttccgaacagccgcgatgccttttcaacgggggtgcagcgtctcttcgtctgcggacaggccatgttccgacatccggcggatgtctccgttacagcggtaaaagggagcggttcgtacaggaggtatgcggcacgtattatgggttataaatagcggctttccggatcaccggcctgtacgggatagatcagcacgaaactgtttcgcccgaggtattgatccaggtaagccgggatcttgttcatcgccggttggtaggagatgcgttcgcggcggctcattaccagccacagacagtcgtccgtgcgcaattcgcgcagcagggccggcagtttttcccagtctttgaaaagtaccgtttctacggttgcggtctgcttgcgccgcagcggttcgatgtacttgagcgttgtttccggggcatagacgacgattttggtcccggtattgcgggccagatttccgattttatgcagccacatgagaaatccggcctctttttcggcttgggagggaatgattacgatatgtcgctttatggtcgccagcggttgtaccggtttgtaaatgtaggtcgtgacgttgctttcgcccagcaggtcgcccgtgatcttgccgaggaagatcgcgggggatttgtcccgatggagtcccattacgatgtccgtgatactctgttctttggcgacgcttgcgattgcgttcgagatattgacgtcgtagcgcagcagctcgtggaggtagatgtccgatgcggcagcggccgtcgccgccgtttcgagaattttgcgggcccgtttttccagcccgctgtcttccaccttgttgtctatggcgtgcagcgcgtagaatccgttgtggtttttcttcgatttgagcacgttgcccagagttacgagttccctgacgctctcttcgttcgacaccgggatcaggatgtgttcgtcctgatgttcggtgctttcgtcgttttcgcggacccctttgatggcgatgttgtgagcgccgcgctgggtggcgaaggtcgaaatggtgcaggtggccaggatcatcaggatcgtgccgttcaggacgctttcgcccagcagacggatcggttctccgtcgggtgtctggccgatgatgacgttgtagcccaccatcacggctgcgagcgtggcggctacgtgggcgctgctcaggccgaagatgaccgtcctttggtcgctggagagtttgaatgttttttgagtgagcagcgcggcgatgtatttggcggcggtgatcaggacgatcatcacggcggcgaccttgatgctctcccagtcgcggaagaaggcccggtagtcgatcagcatgcctacgccgatcaggaagaaggggatgaagatggcgttgccgacgaattcgatgcggttcatcaggggcgaggtgcgcgggatgaggcggttgagggccagccccgcgaggaaggcgccgatgatcggctccagtccggccagatgcgccaggtaggcgcccagaaagaccatgaccagcacgaaaatgtattgggagatgttgtcgctgcaatgcttgaagaaccagtgcccgatcagcgggaagagcagcatgatgaatgcgatgcagagcacgaccgagatgccgagccggtaccagaacatgtcgtccgtgtttccggtgaccatgcctactatgaccgtcagcagcagcagggccagcgtatcggtaatgaccgtgcctccgacggcgatcgtgacggccttgtcgcgggcgatgcccagtttgctgacgatggggtaggcgatcagggtctgcgaggcgaagagtccggccagcaggatcgaggagtagatcgaaaatcccaggatgtaatatcccgccagaataccgagcaggagcggaacacagaacgtatagagtccgaatacgaggcttcgggtgccgttcttgcggaaatccgacatgtccatatccaggccggagaggaacatgatgtagagcagtccggccgtaccggagaggatgatgctgctgtcgcgtaacaccaggttgaggccgtgcggtccgatcaccgcaccggcgatgataagtcccagcaggtagggaatcttcagcttgttgagcagcaggggagcggcgaggatgatgaccagaatcagcaggaatttgagaatcggatcctcgagcgggagggttatgccgtcgaatagaagcatcatgcggaatcggaattagggttaactgatcgggaccgtctgcgaaccgggacatattcgtgttcgccggagcgggggccgatcgggtaatatttctcaaagtgcccgcctgtcggaaaaatccgtaaggcccggcgggctattggcttgaagttgttttcgtgcgggctgatcgtattccgaccgggacggcattcgttttgtcgggagcgacctggctgcatgaaaatttaacggaaacaaagatagtgaaagccgagagaaaacgggaccttgttcccggtttcccgaggcgcatcctatctaagactatgtcaaagatagcaaaaaatggggaatagcaatgctttttttgccgaaaaacagggattccggataaaaaaatgcacggttttctctgtgtattccgagaaaaaaacttaactttgaccaaataatgaatgttgaaggacgtgctatgacggaaaggagagtggacaaacgattgctggcacctgtgctgatggggttctttatcatgggcttctgcgatatcgtggctccggtgaccaacatcatcagcggtgaatttgccgagagccagcagagtgccgtgagttttctgccgtcgatggttttcctttggttcctgcttctttccacgcctgtcgcggcgctgatgaaccgcatcggccgcaagagaacggcaatgatcggctatgcctttaccatcgccgggttgctcgtgccctatgctgcgggcgtcggcagtgccttgagttggtatttcatcggcttcggtctgctgggcatcggcaataccgctatccaggtggcggtcaatccgctgctggcgaccatcgtgcccgaggagcggatgaccagctacctgaccgtcggacagatcttccgcaatactgctctgttgctgctcgccccgatcatcacggggctggtttcgcttttcggcgactggcgtctgttgttgccgatttatgcggggcttacgctcgtcggggccgtctggttacaggtgactgcggtcgcagaaccggcgcaatcgtcccgtgcggtcggtatggccgagtgtttccgtctgttgcgtaaccgcgccgtgctgctctgtacgctgggcgtggcctgcttcatcgctgcggatgtcggtatcggcttcgtttcggtgcggttgatcgacaatcccgattcgattcttacgaccaccggattttacgctttgcgcatcgtgggtacgctcgtcggtgcctgggtgttgatccgtgtcgtcgatgtcaaatacctgcgctggaatatgctgctggcattggcgctttgcatcgcccttttcgcggtgcgctccgaagcggtcgtttatgcgttggttggcatcctcggcttcacgatggcctgcgttttcgccacgttttatgccgtggcgaccaagagtgctccgggccgttcgaacgaagtcgccggactgatgatcctggccatttccgccggcgccctttcgggcccgatctgcggcgcgctgatccgcggcttcggtcatccccaggcgggcttgatctgggtgacggcttgtgtctgctacctgctctgggccgctgccgtattgaaatccgataccaagaaatagagttatgaaaaactgtaaattcctgattatagcgttgttgttgagtattttgactctcccttcttcgggtcagtcccgcagatacgacgattatggacgcagcagccgcagcggatcggcgatcaagggagtggagtggggcgtactggccggactcaactttccccatttttcgacttccggtccggatttcggtatagataaccggctcggttggcaggccggactccagatcggcttgaaattccgctatttcaccatcggtcccgaggtgctttacgtgcggcagtcgatcaagttgagccatgccgactacggaactctgaaaatcaaaaccaattcgatcgatattcccctcatcttctcgcttcgggcgcttccgatgctgcggatcaacgtcggtcccgtctttacggtgatgaacgattgcaagtatgccgagggcaacaacgagatgttcttcggcagtatgcgcccgacggtttcctatatgttgggcctggggttgaatttcggacatacactgatcgacttccgttacaacgggcagttcgattcgaaaaagtgttattatcccaccgaagaggcggtcgggttcaacatgcgctcttactccctggcattgagcgtaggatttgttttttagcttatgatggattccgaagataagaagatcgacatcgagggggtggatccccgggagctgtacggcccccagaatatttacctcgaacagatgcaggagctgcatcccaacctcaaaatcatcgctcgcggatctgcgctcacggtgctcggcccccgaagcgattccgaacggtttcggaaacgactggacgggttgatcgcttactacctcaaatacggctatatctccaaagagtcggtacaacaggctttttcgaccggggtgatcgaacacgacgctcccgtcgataaggacgtgatcgtctatggcaacaacggcacgatcgtccgggcccgcacggtcaatcagctcaagctggtgcagtcctacgaccgcaacgacctgctgctggccatcggccccgcaggttcgggcaagacctatacggccatcgccctggcggtgcgggctttgaaagaaaaacacgtcaagcggatcatcctgacgcgtccggccgtcgaagcgggcgagaagctgggtttcctgccgggcgacatgaaggagaagctcgatccctatctgcaacctctgtacgatgcgctcaacgatatgattccgcccgccaagctgcaaaaatacatcgaggaggggaccgtgcagatcgcgccgctggcttatatgcgcggccgtacgctcgacaacgctttcgtcattctggacgaggcgcagaatacgaccctgccgcagatcaagatgttccttacgcgcatgggacgcaatgccaaattcatcgtcacgggcgacgtgacgcagatcgacctgccccgtcgttccgacagcggattgacgcgggcgatggagattttgcgcggtgtcgaggggatcggcatcgtggagttcgaccgccgcgacatcgtgcggcatccgctcgtcaaacagatcgttgaggctttcgaccgcagcgctgccgtcgaagcggcacctgctccggaaaatggaaaatagaaacgataaccaattaaaataatccctatgtttacaatcagggtaagccgcgatgatagcggataaatgaaaaagctatcgagattttggttagattaaagctgcaaaacctttactaactaaaacgacgatagccatgagagagcaaagaaacaaaattagtttcagaggacaaaagatttatgtaggaatcgacgtccatttgaagagttggtcggttacggtcttgtccgaaacctccgtattgaagaagtttagccagcatccgagcccagaagcgttgtacggatttttaactcggagttatccgggcgccgagtatcactcggtgtacgaagcgggcttctgcggattttggatacacgagcgtctgacggccttagggatcgacaacatcgtggtcaatccggccgacgtgccgaccaagagcagcgaaaagctgcgtaagaccgacaccgtggacagcggtaagctggcgcggagtttaagagccaacgagctgaaaggcatttatacgccggacagcgtatcgttggagatgcgttccttgataagattgaagaactcgataaccaaagacacgacccgtcagaagaatcggctcaagtctcaacttcggtatttaggcatcgagattccgcaggagtttctcactccgttttccaactggtcgaagcgctttttcgcctggttgaaggagatagagacgctcaccccgagcggccgtcaggccctcgacattcatatccggcatctggaagagttacgccgtcagaaactggagatgacacgggctttacggacattggccaagacggatcgattccgcgaaccgctgcggttgattatgagcgttccggggttcgggcaggctacgggaatggcgttcctctccgagatatgcgacataacccgcttccgcaatgccgaacaactggctgcctatatcggaatgatcccgatgtgccactccagcggagagaaagatgggacgggggatattaccatacgaaaacacgccgttatgcgctgtaacctgatagaagcggcatgggtggcggtacgtcaagaccctgcgatgaacctgttctatacggaacaatgcaaacggatgcccaagagcaaagctatcgtaaaggtcgcccgcaaactggtaaaccgtctattctttgtgctgaaacatcagaccgaatatgtcaatagtatcgtgtcatagagaaacccttccggtaaacggattttcccagagagaatactacatagttgttgcggcgttaacgtccgcttaaaataatctgctcctctggcctttgtaaactaataagggatatgcggcagagagctgaccgctaaggaaaatctgtttatcgaaggattttttcgggttctgaaatctcggctttcgagagagccaaaggtgttaagcacgatgtgcctccgcaccggctcgatcaaaggccggcggaggctctcgtgccttgacctttggccgagaagttcaccaagaaatgcaatacgctgtaaataagataaaaacaaatttaaccgaaaactttgatccaattttatttggattgtaacaggaaagaactactatggataagaatttgaccgctttgaaacccgcgttggtttggaagcattttgcagaaatcgctaaaataccccgtccttcctcccacgaggagaagatccgtgcgtacgtgatcggcgtagccaagagtctcggcctggagtgcaaggaggatgcggcccacaatgtctatgtccgcaagcctgcctccaaagggatggagaaccgcaagggtatcgttctgcaggcgcatctggatatggttccccagaagaacaacgataagaagttcgactttaccaaggacccgatcgaggcgtatatcgacggcgaatgggtgacggccaacggtacgacgctcggtgcggacaacggtatcggtgcggcggctattcttgccgtcctggaggacgatacgctcgaacacggtcctctcgaagcgcttttcacagcgaccgaggagacgggtatggacggtgcgttcggcctgaagaaaggggtgctgcacggtgacatcctgcttaacctcgattccgaggaggagggcgagttgtatgtaggctgcgccggcggcgtggatgccaacatcacgttcaagtataaggcggagccgactccggcacggaattaccgggccgtgaagctggttgtcaaaggtcttaagggtgggcactccggtatccagattgtcgagcagcgtgccaatgccaacaaattgctgttccgtttcatccgtgagcagaagaagtcgatggacatcctgctttgctcggtggacggcggcggtctgcgcaatgcgattccgcgcgaggcgaccgctacgctgatggtccgcaccaaggatctcgagcagctgaccaaagagctgaaagcgtatgaaaaggtcgtgaaggccgagttcgccgggatcgaggacgctgtttccatcaaactgaccgaaaccgaaacccctgaaacgatgatcgccaaggaggtggcggagaatctgatccgtgcggtcgtaggctgcccgaacggggtgcagaagatgtcggtgtcgatgcccggactggtgcagacgtcgagcaacctggcccgcgtggtgtccgacggcaagacggtgaagttgcagtgtctgctccgcagttcggtgaactccgagaaggaggagctgggcgaggcgatctccgccgtgttcgagctggccggcgccaaggtggaactcacgggtgcctacaacggttggaaacccaatctggattcgccgattctggccgcgatgaaagcttcctacaaagcccttttcggcaaggaacctgcggttacggccattcacgccggtctggagtgcggcatcatcggtacgaattaccccaagctcgatatgatttctttcggcccgaccatttgctatccccactctccggacgaaaaggtgaacatcgcctccgtcggcaagttctatgaattcctggtcgatacgctgaagaacgctcccctaaaataagtcgttttggaggagatgttcttgcccggcggcggccggcgttggttcgtcattgtcaatcccgtggccggaggtggccgcgggattgaccattttcccctgatctccaagctcctgcgggatgccggaatccagaccgaaccggtcttcaccgaacataagttccatgcgacggaactgaccgtgtcggccgtgaagcagggattccgccgcattatcgccgtagggggcgacggtacgctgcacgaggtcgtgaacggtctttttattcagcagacggtcgatccccgtgaggtgctgctggctgttgtcgccgtgggagcggggaacgactggatccgcacgttcggcgtgccgaatcgctatcaggatgcgatccgcgctatcaaggagggacattcgtttttacaggatgtcggagtcgtttcttacgaagaggctcactaccgtcagcaccgttatatggctaatgtggccggtatggggttcgatgcgatggtagtcaagaaatacgcccatctcaagaagaaaggacaccgcaacaagtggctctatacgtggtgcatgatccgttcgttcttcagctacaaatcgacgggcgtgaaggtttggatcgacgaccggctggtttacaacaacctgttgatgagcatcgccatcggtgtctgcaaatacaacggcggcggtatgcagcagttgcccgaggcggtggccgacgacggactgctggacgtgtcgctgatccgtcccgtccatttctggcatatcctgttccgcttccgttatctgttcaacggcgggatttaccggattcggcacatcctgcaggagaggggcagccgtatccgcatcgaatcttcgccggagatcagcgtcgaggtcgatggcgaattgttgggggagtctccgttggagttttccgtattgcaccgagctgttcggatcgtggtttcggaggagttcctcaagcgggagagctatccgttgtgttcgtgcaatatcgtctgatttgatcgtattatgcgacgaaggccggaatccgtcggattccggccttcgtcggtcttgccgcttccatcgtcgttgtgcggtttgcttttggcgggcggttgttgcgcctgctgtaggtgctgctgcgcactcttgctgaaattatcggctcctgtggcgctgcggaactctttctcggaatgcgaaagggtgagtatgattttttatcggcgcatcggttgcgtacctgacaagattgtaatcggttaccctcttgctccgcgcttgtcgtcttgtcgaaacccggctgtttttgccgttttattctttaatttataccggagctgttgttcggtctttagtcccggggcctgtgtcgggcttgtctgttcggaatcaatgaataaagtcttcgtcaaacgcaagttatcggggagattttcgtatctttgacttcgtctaaaatacttcgcctgggcaaaatgcaaataaatttgcttttgcacgcggcttattcgtatctttgcatttccgaacgacggtatatcgaccgtcttcgcgggggcacctgcattttgccgatgcctgtcgaacggataatattaaaaacgaaagatattcaatggctttacaatgcggtatcgtggggctgcccaacgtgggtaaatcgacccttttcaactgcctgtccaacgccaaggcgcaggcggcgaattttcctttctgtacgatcgagcccaacgtgggcgtcatcaccgttcccgacgagcggctcattcggctcgcggagatcgacaatcccaagcgggtggttcccaccaccatcgagatcgtcgatatcgccggactggtgaaaggtgcctcgaaaggcgaggggctgggcaacaagtttctggccaacatccgcaacacgaacgccattattcatgtgctccgttgtttcgagaacgataacattacccatgtcgatggttcgatcgaccctgtgcgcgacaagggtatcatcgataccgagttgcagctcaaggacctcgaaaccatcgagaaccgccttgccaagacccagaagcaggctgtcgtgggcggggacaagcaggccaaacgtgccgtggagatcctgttgcagtacaaggccgtcctggagcaggggttgagcgcccggaccgtggagctcgagaaagaggaccgcaagctggtcgccgacctgaacctgctgaccgacaaaccggtgctctacgtctgcaacgtcgatgagaagagcgccgtgacgggtaacgaacatacccgggccgtcgaggccgccattgccgacgagcgggccgagatgctgatcgtcgccgcagctaccgaggccgacatcgccgagctggacgagtacgaggagcgccagatgttcctcgaagagatcggcctgaaggagtcgggcgtggcgcgtctgattaaagcggcctataaattgctggatttgcagacgttcttcacgaccggtgccgacgagagccgtgcctggactttccgccggggaatgaaggcgccccagaccgccggcatcatccataccgatttcgagcggggcttcatccgggccgaagtcatcaagtacgacgactatgtggcgctgggttccgaaaaggcttgccgcgaccagggcaagatcggggtcgagggtaaggagtacgtggtgcaggacggcgacatcatgcacttcctgttcaacgtgtagtgccgcgctgccgtttacggatagcggacggggcgccgccggatgcggtgatcgcgtcctgttgaaaacgccggggccggaagcggccgatgaattgcggcgggttagcaagtataattcttaaaatattacgatcatgaaagcgtattggaagtacctcattatcggcgtggcggtcgttgtcagcgcctggttgctcgcaagggcgtacacatataaataccacgcacaggagacgatcgtggtgacgggtctgggcgagaccgagtttatgtccgacctgatcgtctggaacggtttcatcacggccgaagcgcggaacgtcgaggcgggatatgcgcagatcgagtccagcaagaagaaagtgtacgattatctcttgtcgaagggaatcgcagccgaagccgtggtcttccagttcgtgaatgtcaataaacagtacgagccggtctattcggccaatggcagttgggccggacagcgtttcacgggctatcggctttcgcagggtttcaccgttgagtcgaagagtgtcgatgccgttgagaatgtttcgcgtgaaatctcttcgctgatcgcccagggcgtttcgatcgaggccatgcagcccgattattactatacgaagctcgacgacgtgaagttgtcgctcatcgagaaagcatcggccgatgcccgtgtccgtgccgagaagatcgcggtcaatgctggagcgaagctcggcggagtggcttcggcccgtatgggcgtgtttcagatcacgggagccaataccaacgaggagttctcggccggcggatcgttcaacacctcgagtcggcagaaaaaagcccgtatcaccatgcgggtcgaataccgtatcaagtagcctgcgatgggaaatcgagagaaaatcgcccgggtgcttacctcccgatggacggaacgggtatttttcgttctgcttctcgcagcggtcgctttgagggacgatgcggtctggcgtgtggtatcgggtgccttcgttgtgtgggtgatgtgtgcgctgtgggccgtggcgccgactttgcgcaaacctgcccgagggggtgcagcggcgcaggatgcggcaggtcgcaagacggctgaatccgaacatgacgataaaaaggaaatcaacaaagagtaacgaaatatggaaagacctgtccgggtgcgcttcgcacccagccctacggggcctctgcatatcggcggcgtacgtacggcgctttataactacctgttcgcgcgtcggcacggcggtacgatgattcttcgtatcgaagataccgactcgcagcgtttcgtgccgggtgccgaggagtatatcctcgagtcgctcaagtggtgcggcatcgagatcgacgagggtgtcggcgtcggcggcccccatgcgccgtaccgccagagcgagcggcgcgacatctacctgaaatacgcgaaacagctcgtggagtccggatgggcctactacgcttttgatactgccgaggagttggacgccctgcgcaaggagtacgaggcgcgcggcgaaactttcgcatacaactattcgatccgcgagaaactgcctacgtcgctctctctctcgaaagaggaggtcgcagcccgcatcgcgcggggcgaccagtgggtcattcgcttcaagatgcccgaaaacgagatcgtcgaaatggacgacctgatccgggggcatgtcgaggtgaacacttcgacgctcgacgacaaggtgctctataagtcggccgatgcgctgcctacgtaccacctggcgaatatcgtggacgaccgtctgatggaggtgtcgcacgtgatccgtggcgaggagtggctgccgtcgctgccgctgcattatctgctgtaccgggcctttggttggacggacctgcagccccgcttcgcgcatctgcctctgctgctgaaacctacgggcggcggcaaactctcgaagcgcgacggcgacaagatggggttccccgtgttcccgctcttctggaaatccccgacgggcgaaaccgcacgcggttaccgcgaggacggttatttccccgaggcgtttatcaacatgctggcgttgctggggtggaatcccggcaccgagcaggagatcttctcgatgcaggagctgatcgacagcttctcgctggagcgcgtttcgaaatcgggcgcccgcttccagcccgacaaggccaagtggttcaacgcccagtatatgcaccataagagcgacgcggagctggccgcactgtatcagccgatcctgcgcgagcacggcatcgaggtttcggacgagttggccgggcgtgccgcaggcattatgaaagagcgggccacgttcatcaccgatctgtgggatctgacctcgttcttcttcgtcgctccgactcagtacgatgagaagcaggctaagaagtattggaagggcgataatccggctatgctgcgcgaactgcgcgaggtgctggccggcatcgacgatttttcgctcgaaaataccgagcggatcgtgcacggctggatcgagcagaagggctattcgctgggacaggtgatgaacacgctgcgcctggcgctggtcggagccggcaagggtcccggtatgtacgacgttacctctttcatcgggaaggaggagaccctgcgtcgtatcgacaacctgctgcgtaatctgaagccgggcgaatagggatggagatcgaacagcagatctggggcgccacttcggagggcgaggccgttgtgctctatacgctgcgcaatgccgcaggtgccgaagtgcggctttgcaatgtcggcgcggctgtcgtgtcgattctggttcccgatcgtgacggacatttggcggatgtggcgctgggttacaaggatttccgcagttatttcggcgatccggccctgtgcggcaaaagcatcggccgcgtggccggttgcatcgcttacgggacgatgcggattgacggcgaagaataccgcttggatataaacggcatggccgggcatctcaacggcggtgtgaagggcttcgccgggcgcttgtgggagagccgtgtcgaaaccaaccgggtcgtgatgtcgctctcttccgacgacggcgatcaggggtatcccggtaatttgcaggtcgaggccgctttcgatttcgacgaagataatgcgctggaaataacttatatcgctcgaaccgaccggacgacgcccgtgaacatggcctgcaacctgctgctcaatctgggcggcgagggcagcgggtcggtactcgaccacgagctgcggctcgatgcttcgactgttttggaagcggacgatcgtctgattcctaccgggaaactgctcggtgttgccggtacgcccgccgatttccgttcactgcgccgcttgggtgagggcgtcgattccgatttcgaccggatccggatgctgcgggggtacgaccacttcttccccgtggacggttggcggcagaatatcctgaccgaagtcggcgaattgcgcgatgcacgttcgggactccgggtggagattctctcttcgcagcccggcgtgacgctctacaccggcaatcgcttgggcggcggatgccccgaaacgaagtcgggcggccgctaccgggattacgaaggggtcgccgtcgtctgtcaggggtatcccgatgcggtcaatcggccggaatttccttctccgctgcttgcgcctgacggattttattgccagaagaccgtctatcggttcggtactttccggtaggtgatgactctccccaggcttgccctgtcccgaggaagataccggatttttcaactgtcggagccggaaaacggtcccgggttttgcctggttccgggttgtaaacgtttttttcggcaaatatccgaacagtcggtttttcgtcgctgtccgccgcattcggagtgagttgttcgaacaaagctgtgcgccattcctggggtcgagccgggtggcgtactctttttgtgatgcggtgcgattttccgaaatttaatgttatctttgcgcccgtattcttgaaggggtgccttactgtcaggctgagattatacccattgtaccggatacgggtaatgctgaaaccgggaatctataatcgatacgacataccccttttctgttcttttaattcaattaaagttatgaaaaggattttcttactgccgcttacggctgcggctgtctggtgcgcgatgccggtgcacgcggacgaaccggtggaaacggactccatgactccggattccatgaaactgtacgaattgcagcagatcgaggtgaccgctacccgcgtcgatcgcaaaactccggtggcatatgccgatatcggccgagaagcgatttctcgccggaatttcggcagcgacatgccgacgttgttgcaaatgactccgtcggtggtcgccacttcggatgccggcaacggcatcggcggtacggcgttccgtctgcgcggttcggatgcttcgcgcatcaatgtcacaaccaacggcgtgccgatgaacgatgccgagagccactcggtctattggtacgatacgcccgacatggcttcttcggtcggaacgatccaggtacagcgcggtgccggaacctcgaccaacggtacgggagccttcggcggttcggtgaatatgaccaccgccccgatgtcgagcgaattttctggcgaagcgtccctttcctatggctcctacaacaccaacaaacagtcgttgcagatcggttcgggactcatgggcggccattggaccgtcgatgcccggctttcgcatatctcctcggacggttatgtcgatcgggccttcaccaacctggagtcctacatgttgcaggtcgggtactacgatgggggtacggccgtgaagctgatctccttcggcggtgtggccagagtcggactggcttatgacggcgtgacgaaggagcagctcgaaaccgaccggcgctacaattcgcaggggcttgtcaaacatgccgacggatcgatttcgttttatgataaccagacggataactatacccagatcaacaatcagttgatcgtcaatcatcgcttcaacgcccgttggacgctgaatgtcacgggccactacacctacggttcgggttattacaaccagtataagaacggacagacgttgagtgagtacggtatcgcgccgatccctacggacgatccgaacgagccgattaccgaaagcaatctgattcgccgcaagtcgatggacaaccatttcggcggcgtggtggcatcggccaactatactcgtggtcgcgtacaactggccctgggcggtgcgggcaacgtatatgacggcggccactggggaaacgtgatgtcggtcgtcgatgcacccggcttcccgcgtcacgaatattatcgtaacgcctcgaccaagtacgatgccaacgtcttcgccaagatcaactgggaggctgcgcgggggctgaacctctatgccgacctgcagtaccgtttcatccggcataacattacgggcaccaacgacaatttcaacagcaccacttcggcgcttcaggagttggatattcaccgtacctatcactttttcaaccccaaagcgggcgtgaactacactttcgcccggaatcacaaggtctatgtgtcgttcgccgtggcgcagaaggagcctacgcgcagcaacttcaccgataccaagaacggggagtatcccacctcggagcggctgtacgactgggagctcggctaccttttccacaacgatcgtttcgaggcgggcgtgaacttctactatatgtcctacaaggatcagctggtcgctacgggcgaactctcggacacggggcaggagctgtcccgcaatattcccgacagctaccgtcggggcgtcgaactctcggcttcgctgaacatcgcccgctggttttcgctgggagccaatgcgaccctgagccagaaccggatcgagaactatacggaatatgtttcggagtatgacgccgactggaactacctgggtgaaaaggagctgtatctcgggacctcgacactttcctactctccgtctgtcatcgccggagtgctattggatttccatgtcaagggattcagcgctctgctgcatacgcagtatgtcggcaagcaatactttaccaacggccgcaacgatgcgctgtcgctcgacgactactgtgtcaccaacctgaacctggggtatgaattggctgcctcgaaagtcggaagcgtgcgtttcggcgtgcagatcaacaatcttttcaatacggagtattgtaacaacggctacggttattcgtcgatcgtcggaggtgtgcgcgaagattcggccttctattttccccaggcgatgctcaacgtgctggccaacgtaacggtccggttttaggcgatggaactcaaactcatcctgcagatcgtcggctttacgctggggctgctctatctgtggctcgaataccgggccaacatctacctctggctcgtggggctggtgatgcccgtggtgcacggtacgctttacttccagacggggctttatgccgatttcggtatgaacgtctattattttttggcgggaatttacgggtggctggtatggcgcaacgctcccaaaaccgaaaagggcggcggtatttcccgtacgcccgcacgccgctggccggtgatcgcggcggcgtatgcggcgatccatctgttcatctactgggtgctcgtgaccttcaccaacagcaccgtacctttctgggacagtctgactacggccctgagtatcgtgggaatgtggatgctttcgcgcaagtatctggaacagtggtttgtatggtttgtagtcaatttggtgacggtcgggctctatttctacaaggagatcccgctcaccgcactgctctatacgatttacctgacgatgtcgctggccgggtatttccgctggcgtcggatgatgcggcggcaggcgcggaattgattcgggaaagaggcgaaagccgggttactcttcggggagcccggctttttcgatctggtttcgtatttcctgccgcaaggctttgggggtgatgcctgccgcgacgagcagataggagtggcggagttgctcgcggataaaggcgtcgggcagatcgctgtccgtacggatgccgttccagtggcgtttgttgctgtggaaagcgggggtgaccagttccggatagcgttcgcgaagcagaacggcccgatccggatcgcactttacggcgatccaccggaattccaccatatcggtgtaacagaacattttgcccccgattttgaagaccagggtcgtttcgtcgaacggggtgcactcttctgccagcggcagggagaggcaatagcggcgcagctccagaatatccatttcaggatgatttttttagtgtgggtatatgcaggcaaagccggtgcggtgtccgttcgaaggtttttcgttcggtcttgcatccgaagcaaagatatacatagtttttccgattcggaaaataatcgtcgagctgcatcggtgaatttttggcaatctgcggacaaaccgtttcccgcatccgatatttttcgtacctttggctctgataaaccgattttgttatggaggtgaacaagatacaggaagaacttgcccgtttgaccgagctggtcgatggctgggcgggttcgcacgatgtccccggcatcgagcgggatttggttttggacaagctcaaaaaattgtatgaagcgatacggtttgcgaatttcgacgaaggggattcctccgcttccgcgtctgttgcggcacagcagtccgtcgccgaagttgcgccggtgtccgaaataagtatcgacctggacgatctgctggcggagcctgtccgcgatttcctgccggagtcggctgcgatgcccgaagctttgggtgaatccgccggggtgtctgctgctgtgccggaatctgcgccctccgtgaagccggtttcggcatctgccgttacagaacctgagccggaacctgtacttgtcgttgcgtctgctcctgtggccgagccggatccggtgcttgccgacgaatctgcccctgaatccgtgcctgtatcggaatctgcacctgcagcggagtctatagctgtcgcggtcgcggtatctgtgacgtccggtctttcgcggcaggatgcttcgatggaagggcagtccgacaaagcgtcgggaaccgggcacgatgctgcggttcggaccggccgggaggggcttgccggatcgtctgccggtcaggtggttgctccctcctctgaagccgatgccgaatcgaagcagaaagtcgtcgtatcggacagtctgttcgatctggacgatctggtgatccgtcacagggagaagcggcgggtcatcatgtccctctacgagacggacgggccgcaggaagccgctgcttcgaagattccggtcgggaccgggcagaagccggggcatgcagcggctccgcagcaacaggcaaccgctggaaaggagcaggacgatgcagcggctccgcagccggaaacactcctcgaaaaaatggatgaaccgaagaagtccgtaacgtcgcaaataccggagccacagtccgaaacatcggaatccgactctgtcgctgcagagatttcggagcaagcggataatgcggcggatgccgatgcttccgttgccgcttcgcaaaagacgggcgtcgccgaaacgacttcgactaaaaccgatgccccgaaatacccgtttgccgccgagccggagccggtgctgggcgaggtgttgggcggtgacgtgcatacgctggccgacacgatcgccgcgccgaaggacatggcttccgaaatcgtgcgcaaggagcggatcaccgacctgaagcaggcgatcggtatcaacgacaaattcctgttgctgcgggacttgttcggcggcgataccgagcggtacgaacggacgatcgaccgtctgaacgagtttgacgacctggacgactgcattatctatatctccgagaattacgattggaacccttcgtccgacggagtgaggttcctgatggagttgctggaacgtaaactctcctgacgatggctaagctctatatcgttcctacgccgatcggaaatttggacgacatcacgattcgggccgtcagggtgctttccgaagtcgattttattctggctgaagacacgcgcacctcgtcggtgctgctcaagcatctgggcatcgagaaaaagatgtatgcccaccacaagttcaatgaacatgcgacggttggtctggtggccgacaacatcgcccagggccgttcagcggctctgatttcggatgcgggcacgccgggaatctccgacccgggattcttgctggtgcgggcctgtcttgaagcggggatcgaagtggaaacgttgcccggggctacggctttcgtcccggcgctggtgcagagcggctttccgtgcgaccggttttgcttcgagggttttctgccccagaagaaaggccgcaacaagcatttgcagagccttgcgtcggagccgcgtacgatgattttttacgagtcgcctttccgggtggtcaagaccctcgaacagttcgccgaggtgttcggtccggagcggatggcggccgtgtcgcgggaactgaccaaaaagttcgaacagaccgtgcggggaacccttgccgaggttgcggactatttccgggaacatacgcccaaaggagagttcgtgatcgtggtggcggggcttccgaaaccgggaaagaatatggatacagaatccgaagaagagtaaatgagtgatatggaaaatagtgaattgaaagagcagccccgtcattcgttccgactttgggcggagttccgggcctttatacgggaccgtttcagtctggaggatgacaaggcctcgcaggatgaagtagctgctaacatcagcaagggtacggagtttcgcggcgtcaatttgtgggtcctgatttgcgcaacgatggtggcgtcgctgggactgaatgtcaattcggccgccgtaattatcggcgccatgtgtatttctccgatcatggggccgattatgggtatcggcttttcgctcgggatcaacgatttcgacctgctgaaaaaatccgtcaggaacttcgtcctgatgttcgtcgtggcgatttcgacttcgaccctcttctttttcatctccccgctggggaatgcgagcagcgaattgctcgcacgtaccactccgacgacttacgacgtgttgatcgcctttttcggcggtatggccggtatcgtggcgcaatcgcgccaggatcgtaattcgaccgttattccgggcgttgcgatcgctacggcgttgatgccgcctctctgtacggccgggttcggtttggcgacgggacagtatcgttttttcttcggggcgttttacctgtttttcatcaatacggtttttatcgccctggctacttatatttttacccggtttctgaagtacaggaagaagacgtttctcaacaaatcccgtgagcgtttcgtgaagcggacgatgctggcgattacgctcgttacgtttattcccagcgtattcatcggcttgcatatggtgcgggtttcgattttcgaggtgcaggccgataagtatatcgcccaggtgttcaatttcccgcagacccgtgtgatcgaatccagcaagatctaccgccggggcggagaatcgccccgtatcgaactgctgttggtcggggagccgctcggcgaagatgtgatcgagaatgcgcggggacagctcgcaagctatgggctgcctcggacagaattggtggtgcgacaggcatcgaactcggataaggtcgatttgcagtcgctgcagtcgagttatgtggagctgctggacgagaagaatcggcaaatcgccgagatgaaacagcgactggctcgctatcaggtgacgaatgtcgatatcggcgatatttcgcaggaggtgggcgtgatgtcggataacgtggagtcgatgtcgcttaccaaaggggtgatgttcgacgttgcgggcaaaccgctggatacgctgttggtctgtgtcattacgccgaaggatttccaacgccagatagaccgggagcagttgcgcaagtggctttcggtccgcacgaaggtcgataatgtgaaactgttcgtagaaccgaaatcgaatgagtaagccggaggtagaaagacagaaaagcccgaatctgggtttttggggaaggatcggactggaaagcctctggattttctgtaagtttttctccattttgccgtattggtttcgctattacgtggtggaaccggccgttttcggtgcgttgcgcctgttgcgttaccgttatcgggtcgtgacggagaatttgcggaactcttttccggagaaaagcctggaggagttgcatgctatccggagaggtttttaccgtactttggcggagattttcgtggataccttcagtctggccggactcaccgacgagaaatgccgtcaggtcgtcgtcgtaaaggatctggaaaagcagatggctgcggtcgagggccgggactggatcgctctgacggctcatttggggtgctgggaatactgttcgttctgggggattatcgtcccttcgcaggtggtcgtggcggtctatcatcccctgcggagtcgcgttttcgacgaattgtacaaacgtctgcgcagccatgcgaatatctgtccggtaccgatggctgagtccctgcgcttctatctgcgaaatcgggagaagggaatcgacggcaagaatatcgtgatgggactgattgccgaccagaatccgccgcgccgtcccgacagccattggttccgcttcctcaatcgggatacgatctttttcgacggaggggagaagctggcgctgcgttgcggcctgcccgtgtattgctgctggctgcggcgtgtcaagccgggttattacgagatggatttcgaccggatttacgacggagaagaggaggtcgctccccatgaaataacggaacgctatgtgcggcgcctggagcagaagatccgcgaataccccgacctgtggatgtggtcgcacaagcggtggaaacacaagtccccggccgatctggcccgcatggaatgcgaacgaaaacagaaatagtgatcctgaattggaacggtgccgggcatttgcgccgtttcctgccttcggtgctcgcatcggttcccgaaggggtcggcgtcgtcgtggccgacaacggttcgacggacgattcgctcggcgtgctcgaacgcgaatttcccgctgtggggcgaatcgtactggaccgtaactacgggtttgccggaggttataaccgggcgttggagtatctcgatgcggactatttcattctgctcaattcggatgtcgaaacgcctgccggatgggtcgaaccgctcgtcgaaacgctcgatcgggatcggaccgtggctgccgtagcgcccaagctgctgtcgctcgtcgagcctgcacggttcgagtatgccggagcttcgggcggtttcatcgactacctggggtatcctttctgccgaggtcgtattttgcagtgtgtcgaacgggacgaagggcagtacgacgatgcccgcgatgttttttgggcgagcggcgctgctttctgctgccgggccgaagtatttcgggcgatgggcggtttcgacgaggattttttcgcccacatggaggagatcgacctctgctggcggatgcagctggccggttaccgggtgcggatcgagccccggagccgggtttatcacctcggcggggggagtctggcgcagggatcgccttcgaaggtgttttacaaccatcgcaataatctggcgatgctctacaagtgtgcgtcgccggtgcagcggagcgtcgtggctatcgtgcgtccggtgctcgactcgtgcgcggcgctgtcgtacctgatgcaggggcgtccggattacgtgcgggccgtgggacgtgcgtggcgggattttctgcgggcgcacaaggcgctggccgccaagcggcgggctgttcgcggtgcggcgaaggggaagccccggggcatatactgcgggtcgatcgttctgcgttatttattaggtcgcagacggttcggcaagttgctgtaaaggggcggcgattcgaatgcgaccgctgccttatgtgtcgatgttcggacgggggcgatttaagctggcgataatatacttttgtgtacctttgggggtgtgtagcggcccaagtcctctccgagaggagatccggagaggcagaattataaatgcggctgcgaatctcaaataagcggctgccggattcggagctgtgactgtcggataaaggtacgctgaaatacataattaccctgaagaaagtatttggatggaaaaactggttgtcatacctacttataacgagcgggagaatatttcgaagatgatctcgaaggtgatgtcgctcgagggcggttaccatttgctcgtggtggacgacggctcgcccgatggaacgggagcgatcgtcaaggagcggcaggcggagtttccggatcgtctgtttctgttggaacgctcgggaaaactggggttgggcactgcctatatcgagggattccgctgggcgctggctcgcccgtacgatgccgtgttcgaaatggactgcgatttttcgcataatcccgacgatctgctgcggcttaccgccgaattggaggccggagcggatgtcgccgtcggttcgcggtattcgaaaggagtgacggtggtgaactggcctatgtcgcggctgttgatgtcctattgcgcctcgcggtatgtgcggatcgtgacggggatgcccgtctgcgatgcgacggccggattcgtcggctataagcgggaagtgcttgcggcgatcgatttcgaccggatcgagatggtggggtacggattccagatcgagatgaaatatacggcctggaagatgggattccgcatcggcgaggtgccgatcatctttgccgaccggaccgaaggaacctccaagatgtcgggcggtatcttcggcgaagcgttcttcggggtgctggccctgccgtttcgaacgatcgcccggaagaaataacggtcgttgcgttgccgggaagtgtattcctcttatgcgggcggtaaatagagtgttgagagggaaaacggagaaatggttacgataagggaatatcggacgacagacaaggatgatgtgatggaattgatccggcggaatacaccagaatattttgcggcggaagaagaaattgatttgagtgattatctggatcgagaaatagagtcgtattatgtgctggtcacgaatgacaggatcgttggttgcggcggaataaattttgccgatgataaaaccgtcggcaaaataagttgggacatcatacatcccgattatcagggaaaatcgcttgggaagcaactgctcgaatatagaatcgacaagttgaaatcaattgatcgtgtccgcaagataaccgtcagaacttcgcaagttggtttataagttctatcagaagcaaggctttgtgttgaaagcgacgcataaggactattgggccaaaggtatcgatatgtattatatggagtatgaaggcaattagaacccctctgtattttaaaatgtaagatatattttactcctgaatacagcaacgacagggcgtcggaaattttccgtgaatatccgatatggagtttacggcgaatattgaaaacacgatttatcaatcgaaaagccggagcttcgatagctccggctttttcattttaccgtagaagaaatatctatttgttgatcttggcccacgaatccttgagggtcaccgtgcggttgaataccgggtgtccgggcttggaatccgtatcggcgcagaaataccctacgcgctcgaactggaacggctgcccgatgggagcctccttgagcgacggttccagatagcctcgggtgacgatcatcgaatcggggttgagattgtcctcccaactgccgccttcggccacgtcgtcgggatcttcggttttgaaaagcgggttgaagagacggatttcggcttcgatcgcatcggccgccgatacccagtggatcacgccctttacgcggcggccgtcgctcgacgaaccgttgcccgactccgggtcgtacgtgcagcgaagctccgtgatgttgccttctgcatccttgacgacctcttcgcatcggatcaggtaggagtagcgcaggcgcacctccgtaccgggactcaggcggtagtatttcttgggcgggacctccatgaagtcgtcgcgttcgatatagatctcgcgcgagaaaggcacctggcgcgtgccggcgctttcgtcttcgggattattgattgccgtgaaaagctcggttttgccttcggggtagttggtgatgacgactttcagcgggttgagtaccgccatgcggcgttcggcgaccttgttcaggtcttcgcgcacgcagaactccagcttgcccaggtcgatcacgttgtcgcgcttggccacgccgaccatttcggcgaagttgcgcaccgaagccggcgtataacccttgcggcgcagggcgcagatggtcggcatgcgggggtcgtcccagcccatcacggcgccctcctgcacgagcttcagaagacggcgcttggacatcatcgtataggtgaggttcaggcgggcgaattcgtactggtgcgagggatagatgtcgagcgcttggatgaaccagtcgtagagcggacggtgcacgtcgaattcgagggtgcagatcgagtgggtgatccgttcgatcgaatcgcactggccatgcgcatagtcgtacatcggatagatgcaccatttgttacccgtgcggtgatgctcggcgtgcaggatgcggtacatgatcgggtcgcggaacagcatgttcgggtgcgccatgtcgattttggctcgcaacaccttctcgccgtcggcgaactcgccctttttcatccgctcgaacaggtcgaggttttcctcgaccgagcggttgcgccagggcgactccttgccgggctcggataccgtgccgcgcgtgaggcggatctcttcctgcgtctggtcatcgacataggccaagcctttcttgatcaggacgacggcccagtcgtagagctggtcgaaatagtccgacgcatagcgttccaacgcccagtcgaaacccagccaccggatgtcgcgcttgatcgaatccacgtactccacgtcctccttcaccgggttggtgtcgtcgaaacgcaggttgcacttgccgccgtatttcttggccaggccgaagttgatgcagatgctcttggcgtggccgatatgcaggtagccgttgggttcgggcgggaaacgggtctgtacgcgcgtgtcgcccttggcgatagactcctgaatgatctcttcgagaaagttcgcggctttctccttggtattggtgtcgttggttgcgattgccatagcaggtatattttttacaaaattacaacttttttccgcctttgcgcctatttcttgggacggtaaacggttttttgcagattgaccgatactttcaggatctgctgcaggcccaggcccacgccgtcgtaatggaaatagaatccggccgaaacgcccaccgtgttgttgaagaagcggcggttgtaggtgacggccgtctggttgtagatcttcttgggggtgccgtagaaaggcgtgccggcatacagtccgtagccgtagatgtcccagaaggggagcatgttctcgccgacgtagagttcgttgagcagacagacaccccagcggcttaccgacagggcgaggcgcccgcctttgggcgctttccagccctcttcggtgcggcggtcgcgctgcaggctttgcaggtagcccagccgggcatcgaaggtgtaggctccttcgtagcggtagccgacgtagggattgagcaggatatgatccacgaccccttcgtccaactccgtattgtcggttttggcgtagtggagcagggtcatgacatagccgccgtaccagtggcgtcccttgtattcgccgcccgagaggatgcggaacttctcgcgcgtctggtacgagcgcattccctcccagtcgagggcgaactcgatgaaggagcccgtttgggatttatagtgggcggccaggccctggatgcgattattatagaacgagtaggcactgcccaggaagaacggatcgtatcgggccagcagcagggagcgcgggaaaataccggctacggcctgtgccgtcttcgagttgaactggtagtagatctgggggtccactttactcaagaacttgtgttccttgtcgccgaagtcttgcaacagatcgacggctaccaccagctggtttttttcggaccagataacacccgctttcggggtcaggcgcatactgaagaacgtgtgcgaatcgtcgatgttgcagtccgagtgttcgcggttgtcgaaccgggtgtcgaagtcggctccgatgaaaacctcctgggccgaggcgccggcggcagccagcagaagtgtcaggataagtgcgatttgcttcataggcgatcgtagtcgtttgtcgcacgttccgtccggttgccggtccgccgggcggagccgtctgcggaacgggacgcttttgcgtgtattcaggtcgccaaagttagctaaaatattcggatttgcttacttttgccgtgaaaacagggaagttgtaacgatgagaaagattaccaacgaagagctggggcgtccctctgccggggagttcgcccgtatggagaaaatgccggtggcggtcgtgctggacaacgtgcgctcgatgcagaacgtcggggcctttttccgcacggcggacgcctttgccgtcgaacgcatcgccttgtgcggcatcaccgccaccccgcccaaccgggagatccacaagacggcgctcggagccgagctgaccgttgcgtgggactatttcgccgcgacgaccgactgcatcgctgcgctgcgtgcgcaggggtatctcatttacgtcgtggagcaggtcgaaggagccgtcatgctggatgaattccggcctcgaccggggcagaaatacgccctggtgttcggtaacgaggtggacggcgtggcgcaggaggtcgtggatgcggcagacggggcaatcgagattccgcaggccggaaccaaacattcggtgaacgtttcggtggctggaggagtcgttttgtggaactttttttggcaaatccggccaaagcgctaaatttgccccggtttaccggagggaaaaggaggaatatccggaggtttcccgattcgaaaattgaaaatatataatgctatgtcagtagagagtacagtgagggcggtcacgacgtatcgtctgtgggagatgaagcagcgccgggagaagatcgccatgctgacttcgtacgattattcgatggcccgcatcgtggatgcggcgggggtcgatgtgatcctggtgggcgactcggcggccaacgtgatggcgggttacgaaacgactgtgccgatcacgctcgatatgatgatttatcatgcccgctcggtcgcacgcgccgtgcgccgtgcgctggtggtggtcgatctgccgttcggtacgtaccagggaaattcgaaagtggcgctcgagtcggccgtccgcatcatgaaggagaccgaggccgatgcggtgaagatcgaaggcggcgaggagatcctcgaatcggtgaaccgtatcctttcggcgggaatccccgtgatggggcatctgggcctgacgccacagtcgattcataagttcggcacctataacgtgcgggccaaagacgaggaggaggccgagaagctggtgcgggacgcccatctgctcgaagacgcgggatgtttcgccatcgtgctcgagaagattcctgcggcgctgggtacccgggtcgcctccgaactgcggattccgatcatcggtatcggggccgggggcggcgtggacggacaggtgctcgtgattcacgatatgctggggatcaacaagggtttctcgccgcgtttcctgcgccgttatgccgatttgcacgaggtgatgaccggtgcggtcacgtcttatgttgaggacgttaaatcgggcgatttcccgaatgagtcggagcaatattagaaatacgggtttttatatcctctttatgtgtatcggaagttcccggcggagcttccgatattttttcgttatgtcctgtttcctgcgaaccgatgcttgaggggaataggctttcgtgccggatggacggcgcgagaccgtattgtggctttcaccgctgtatgtacggcgatatgtcggcggcggggtgagagtgccggatccattacggggattgccgatctcgaaagttcgggaaagggacgggaacggatttgtcccgatcttcgaaaatagcgcacgtttcgtttggaatgcaataatttatttgctatctttataaaagaatgaggccgaaatcccggcagacaggccgattcgggttttgaccgcaggtgaagatcgattgagaatgaatggcgggagggtatcttctggcgaagattcccgctgctgacccaagtaaataaataattaaaccgctattgcttatgaaaaagaagatcgatgcgacggaaaatccgtccagactggagaacgcaagtgcaagggcgttgtccgccgaccgttccgaacaggcatcccgtcccggaacattcagtactatgatgagcgaccgcgtgattttttcttcggcatccgcccggatcgtcgctgcggaacaggtaaagggaaacaaaatcgcagcgatgaagccgggtgcggacacttcgctggcatcggctgccaactggaaaacgacgaacggcagcaacctttcgttcggaaattttcacggtaaatcgtgtatgaaaaccgtaggtgccggatcatcggcaggggtctggctcgactatttcgaagatgccccgctttgttcccagggacggccgatggcgacttcggtcgatgtcttcgccgaggctccggcgcagattcgtttgggagctgcggatgaaacgaaaagtatcgtcgagcttgcggaatatcaagtggggcgatggattcggatatcgacggttttgacaccgaccggtatgcggaattttcagatatataataataccgctggagccattgtatatttccggaatgcgaaggtcgagttttcctcttcaccgacactctatacgccgcaaacccaggataatatttggcatgccgatttggaatttctttacggttgcaacaactttgtgaaaaacgatcaagtctatttccttcagaaaaattcggcatccggtgctgcaactcgtcaatattggaaactggtaacagctgcgggagaagactggatcgagttttcgagtaccgattccgaaggaaccggcgagcctcaaccgggcgattggatcgctcagctcggtaatcgcagtgatgctaaacgccagtcagctttagtacaggaatttacttcagaaggtaaaatccttgtcgtatggtatgaaggaattgattcgtttagtatgaccgaccgggatcgtatgcatataggcaacggagctatggatgctgaagttatgaacgtgggtacaattaattcttcaacgatcaataataaaggcgaagtggaaactaatacgttgaatgtcaagagtcggatcgatgcggggaccatcgtcgccacaggcaatatcacgacgaagggaaccctgaccgcttcaaagatcgagggcgatttccccatggatataccggatgacttggaggttaataccgttacggcttcggggactgtgaaagctctcaatggagagttcgataccgttacagtgaaagataaaaacattatattaaatcaagaaggaatcacctgtaaaggacccgcattagcaggtaatttgtctgcgaatggaattgtattgaaaaaggataatactacatatattgaattatcaactttaggtaatctatacacggttatccgtctccataatcttccacaaggcggccctaaagattctcggattcaaaccttacccactaatcatatttttatcaatacagatgaaccttttgcagaaaatcaatttggtaaattttaccctttaggtatcaaactataacgatattcactgaaaagagaggaaaattattttcctctctttttatagtttcttgatagttaaacatgcaaattctgtatcgtccgtattttctgaagcacctaactgttgccaggtcgtattttcgagtgtgcagagcaaaccgttgatttcccactgttggggattcagaacgcgatacacattctccgatccgctttgtaattcaaattccggttcttcaggagataaacatatcttgcacgcatattgtaaatcatgtagaggattcggatctgcaattgtggccgtgcagtataatttttctaatctttgtcccggtaaattcgtaaatccgagaaaattgaccggacgagttcttgcataataggtcgcctttaatatatcagagttgagtgtattttcattgtctatattattttctaattgcatgagtggtgtcccgaaggtgtaataaaatgcatcgcatcgaatctcatttgtcacaattgggatagtttggaatcgacgtatggatagattcccaatggaaacaattgcttcgacggtaaaattgtccgttacatctgttaagtcaatcgtaatttgcgatgaattcatattgtaatcgggattgattatatatgaggatgaatgatctgttttccccataataggagccgaacagttccaacggacattacacttttctttggcaggagaaagccaccagattgattggatttttgctgttttttcttgaatgatttcttcaattaaggaataatagtttgtaagaattactgatgtttcttcccaaacttccacgccatagacatcgtgaccatctttataaagaatccccaattcgtcgctggtcggattgcaaccggtattgtcgtccgagcaggaggttccggggacgagcaaaagcgttgccgtaataaaaagcagaattcttttcatggcaggagagtgtctaacgtatcatgtatcttgtcggtgattcggcttgcaaaacgatcgtttgccgatgcgccgcccctatatttttgtgaagtgaaagtgccaaaacgtggattacggtggtcgatacgcggagcgggattcgtgaagacaaattgatactcgatattgcggctctggaggaaggatcccgttatgcgagattgcagttcctgaatccggacggtaaggtattgaaatctattgatatctggcaaagtacggattttacgatcaaatttgaattgatttctttggacgaacgggagatccgggtaaaatcgattcctactgatccggatgtttggtaccatatggggattgcctccgctgaggatttcgatcggtatgcggattggcataaattcgtcgagaatctgatttcttccgatggagggggactccttgccgtatatgtcggtgatgaagaattttcgacgacatgtactccgggtacggaatacgtgatttatggatttgcgtatgatgattcggaggtacgatcggatatatcgattttccgcgtgtcgtccgtgtcattgcctcgtaattacgatgtggatgtatccgctacttgggcgatttataacgggaaggctttggcggagctttatccttccgtttatggagagtatggagatgctacgtgtgtgtttgtatttacattgaccccgagtaacgcggagtcggttcattattgggggcttctgcacgcagcacgcagtgagactatgagtcttccggatatgttgattttcgattaccttgaatcttatccgtcgttaggttggctggattccaagcgcggtgtgtatcgtattccggaacaaaacatcgcgggtccctggggatttttttatgtggctcaggacgagagcggcgcatggggagaattgcattatgaagaagttctgttgaccgaagataaatacgaagatccgcggacagctccaatggatggttttgacaacaagaagacgtgggccgtaaagtcggctgcttccgtagcgttccctgctccgatcaggttcagtaaagcgtcattcatgcaggttactgaatcattcggcggcttttaggtgttcgttccaaaatatattcgaccgagtatcggaatttttcttgcggcagcctttcggggctgccgttttgcatcttttagtaggactattttttttggaaattcggggagtgtacgaaaaataatccaaaaattatgattacttttgcaggcaacaaaatctcactcctatgtcttttatcaatgagaaggtgcaacccgaaggacttacgttcgacgatgtgcttctggtgcccgcatactccgaagtgttgccgcgtgaggtcagcgtagtgacccgtttttcccgaaacatccaactcaacatcccgatcgtatcggccgccatggatacggtgaccgaggcgcctctggctatcgccctggcccgcgaaggcggtatcggcgtaattcacaagaatatgtcgattgccgagcaagcggctcacgtgcggaaggtgaagcgtgccgaaaacggtatgatctacgacccgatcaccatttccaaggacgataccgtaggcgatgcgctggcattgatgaaggagaacaagatcggcggtattcccgtcgtggctccggatcagcatttgatcgggatcgtgaccaaccgcgatttgcggttccagcgcgatatgaaccgcaagatcgacgaggtgatgaccaaggaggggctggtgaccactcacaattccgacttgcagcgtgcggccgacattctgctgcgcaacaaaatcgagaagttgcccgtagtcgatgccgacggcaagctcgtcggattgattacctataaggatattacgaaagtgcaggaccatcccaacgcctgtaaggatgcgaaaggccgtctgcgcgttgcggcgggggtcggcatcacgcccgacgtgatggatcgcgtgaaggcgctcgtcgatgaggatgtcgatgccgtcgtgctcgatacggcccatggccattcggtcaatgtgaagaatacgctgcacaagatcaaggcggtttatccggatctggaagtggtcgtaggcaatatcgccacggccgaagccgccgagttcctgatttctaacggtgccgacggcgtgaaggtgggtatcggccccggttcgatctgtacgacccgcgtcattgcgggcgtgggcgtgccgcagttgtcggctatttacggcgctgcgtccgtagcccgcaagtacggcattccggtcattgccgacggcggtttgcgttattcgggcgatatcgtcaaggcgcttgccgcaggcggcgactgcgtgatgatcggttcgatgttcgccggtacggaggaggctccgggcgaaacgatcatttacaacggccgcaagttcaagagctatcgcggcatggggtcgttggacgctatgaaagccggttcggccgaccgctacttccagaagggcgatgtgaatatcaataaactggtcccggaaggtatcgtggcccgtgtgcccttcaagggaatgctttcggaaacggttttccagttggtcggcggtattcgcgccggtatgggttactgcggtgcgcgggacatcgaggcgctcaagcaggctcaattcatccgcatcacctcgtcgggtatgcaggagagccatccccacgatgttgccatcacgagcgaggcgccgaattacagcagcgagcgctaaactcctgacgcactgatgccgaatatccgaagaaatcggttgcgaacgacccgatacgattgggcggcggtgttcgttgtcctgacgcttttggcgatctggtggtttacgggctgtcggcacgcatggatgcgccatctggtgttggcatcggcgcttttctattttttcgtcgtccgtatcgccgtgaacctgtaccgtatgaaaaaggataattcggaaaatgcgagtgaagaaaataaaaaccaaatagaatagatgcaggaaaaaatagtcattctggattttggatcgcagtacacgcagttgatcgcacgccgcgtgcgtgaactcaacgtctattgcgagatccaccctttcaacaagatccctgaactggatgcttcggtgcggggcgtcattctttcgggaagtcccttttccgtacgggacgaaaatgccccgaagcccgatctgacggcgatcaaaggtcgtctgccgttgctgggcgtctgctacggcgcacaatacctggctcatttctacggcggcgaagtgcagtcggctcccagccgggagtacggacgtgcgatgcttacggtcgtcgagccgtccgatccgctgatgcagggagttccgtcgcctacgcaggtgtggatgtcgcacggagatacgattacttctgttcccgacacctaccgggtgatcgccagcacggaggacgtgcgctatgcggccttccgtatcgagggagagcggagttggggtattcagttccatccggaggtgtaccattcgaccgacggcattacgctgcttcggaatttcgtggtcggcatttgcggctgcaagcagaactggacgccggagagtttcgtcgaaacgaccgtccgggagttgcgtgagaagctgggtgacgaccgtgtcgtgctcggtctttccggtggcgtcgattcgtcggtggctgccgtgctgctgcatcgtgcgatcggtaagaacctttactgtatcttcgtggattcagggcttctgcgcaagaacgagttcgacagcgtgctcgaatcgtacaaggggatgggtttgaatgtcaagggtgtcaaggcccacgaccggtttttgggcgacctggccggagtgaccgatcccgagaagaagcgcaagatcatcggccgcgatttcgtggaggtgttcaatgccgaggccaagcagatcgagaacgtaaagtggctggcgcagggtacgatctatcccgacgtggtggagtccgcttcggcatcggtcaagggacctgccgcgatgatcaagtcgcaccacaacgtcggcggcctgcccgaagagatgcacctgaaaatcgtcgagccgctgcgcctgctctttaaggacgaggtgcgccgcgtgggtaagtccctcggtatcgatccgcaattgctggggcggcatccgttccccggtccgggccttgcgatccgtattctgggcgatattaccccggagaaggtggaaattctgcagaatgtggacaaaatctatatcgatgccctgcgcgagtggggactttacgaccaggtatggcaggcgggagcgattctgctgcccgtgaagagcgtcggcgtaatgggcgatgagcgtacgtacgagagctgcgtggcgctgcgtgccgtagcttcgaccgatggcatgacggccgactgggtgcacctgccgtacgattttctggctgcggtgtccaacgatattatcaacaaggtgcgaggggtcaatcgcgtagtgtacgacatctcttccaaaccgcccgcaacgatcgagtgggaataggaatttaggtcgaaaatgcaaaagacggaaaccctgcggtttccgtcttttgcatttgtaaaatgtcggttctttggcgggagtttggcggccggcctttacttgtgggggcgttcggaatgggttaaacgcagcttcggtgcggttcgctgttatgcgagccggtacagtatcccttcgtaaggccgtagttcgatcgggccttctttttcggctatcggtggggcagggtagttatgcagcaatggcatggcttcggtcaaatccgttttcgggtcgaaccgggcagccttcgggctgaagttcaggactgtgaggtagtttcggcctgtcccttcccgcaggtaggcgaatacctgcgggttgtcagcatcgaccggccggaacgagccgtaaaccaggtccggatgtcctttgcgcagcgttacggcccgtctgaagaagttcaatacggaatcggggtcgcataactcccgagcggcatttacctccgtgtggtcgggattgacgcgaagccagggtttcgccacggagaaacccgcgtagcggctgccgtcccattggtagggagtgcgggcgttgtcccgtccgatctcctgctgttcgcgcaggaattgttccgtatcacggccttcccgcaggagtttgcggtaatggttgcgcgtgtcgatgtcgtcgtactcttcgatgcgggtgaatcggatgttggccatgcccagttcgtcgccggccagccaatagggggttccccgcatcgtgagcaggaacatcgtgagcattttggccgacaggtcgcgccactcgggggtgtcgctgccgaagcgcgaaaccatgcgcggctggtcgtggttgcccagatagatcgtaggccagccgtcgcccacggctgcgtcccattcggcgtacatacgcttgagagcgagcagactgtacggaattccggttgcgggatcgtccgcctccgtttcgttgcggatgtccgccgcgccgaagtggtagagcatgtcgagctcctgacgttcgggtgcgatgaatttccacccctcttcgggggaggttttcgagccttcgccgacggtcgtacagtcgtagcgggagaatacctcgcggttcatttcgtgcaggtagtcgtgcaggtgcggcccgagcgagtagtaggggaacacgtccgggtacttgcagaggtcgatctccggaaacgacgtgtcttttgcaatgtatggaatcgaatccagccggaatccatcgacccccttgtcgagccagaaacgcagaatgtcgtagatttcggcccgcacctcgggattctgccagttgaggtcgggctgctgccgggcgaagtagtgcaggtagtaggaccgcgtgggggcgttgtagcaccaggcatcgccctcctcgtcgaaatggctcttgcggtagggcggacggccctgctcctcgggccaccagaggtagtagtcgtagtaggggttttcccgagaggtgcgggcctcgcggaaccagggatgctggtcgctggtgtgattcagcaccaggtcgaggaggagacgcatgcctcgtgcgtgtgcttcgttcaggagccggtcgaaatcctccatcgtgccgaaatcgggcatgatctgccggtagtcgctgatgtcgtagccgttgtcggcgttgggggatgcgaagatcggattgagccacagggtttcgatccccagcccgtgcaggtagtcgagtttttcggtgattccgttcaggtccccgataccgtcgtcgttgctgtccttgaaactgcggggatagatttgatagacgatcgtttctttccaccaggctttttgcaaggcaggggatggaggagtgaatatgggcatattgttcaggattctgttatacgatcgcaagataagaaaaaagagaagtagaaggttcttatcggaggaaaaaacgacagggagtctttgactccctgtcgttcgattcatatttttatggcaatcggattttacaggctacctccctggcggacggaaaaacgaaacgagcggactttttcgacaggcggttgcagatgtccttcgtgcagatatgggaacacccttccgcggcaatcgagatgcggttctgctctgccgatggcgtgcggaatgcttcgattcagatatttttcggatttttcaggtggaacaggagcgaaggcaggattacgtcccgccaaaaattctcgggcagtaaggtgcggtatttccagcggcatgagaagagtttgcgggttttccggccgatacgggtcaggcggttacctgacggagtgcggtacactccgaagccgagaatgtcgttcagtacccgctgtttgagctgtggatccggaacggcagagagcagcggtgtgaaatcctcgtcgagcaattcgccggccaatgccgtgaaaatgttatagaccgtgtcgtaaccggttgcagcgtaaagcgtaaggattttctcgaagtcgatttccgattgctcgctgcgcaggaaaaggccccaatccagcagatgtcggaggttgatgccttccgtcccgaaatgccgggccatgtggcgcagcagatagagtgcgttgaacatcggggatggggtgtaatagcccgccggcgctaatcggctgttctctgcttcacccacgagaaaatcgtctatggcacgctccgtccggcggtgcgacggcataagcagatggctgtgattttcgaccatgacgcccttgtaatggaaaacggcatgtttttcactatcgtaattgattttaatccccagctcttcgatcaaacggttgcccttgtcgcagttgtcgagccacagatctatgtcgccgcattcgcggtgctccggccgggggtagtaaatgctgaggcccagccctttcaaaaggatcgtacggacgccgtgcgaagcgaagagcgttgtcagttcgtgtgcggcacgggtctgttgggcatggcgcttctcgatggcttccgaactcagggcccaacggattttgagggctctggagggctgttgctgttccgggagccggagaatcgtgtcgaagagcagggccgtaacgccgtgttgggccgcaagggtaaaaagacgggtccagtcttcttcagacaagttcagtatgtttggctgtaatatgctaggggtaatggttgggcgcaacaatgcaagcagcaaagtatgaagtttatacgtaatatctttttgcacatattccggaaatggctttattggtcgatcatatactttgctgtttttcatgttatcaacttgtaatttttatatccggatgttgtttatggctgcttgattgacagatggttctaatgtatatccttaatacgaagcataaatagtacgattcgatttatcggataaatttttttatggatgaaacaacttcgagaatctgttcgtcggttaaagaggggccggaaggaagacatagtcctcgttcgaagatggtttccgcaattttgtttccataatatgcgttgcgtgagaaaattggctgcatatgcatcggacgccaaagcagacgtgattcgatattctcctgttcgagatgtatgcgaatgtcattcgctgttttgttattgcattttttcgcatcgacttcgatgcaggtcaaccagaagttcgaatcgtattcggaggatggattctgcttgacatgaattccttctgtgtccgcgaagttttcggaataaagtgtatgtattgcccggcggcgtgcgatatattgttcgagaacagtcatttgacctcgacctataccggcgcaaatattggataatcggtagttataaccgatgtgtttatggtagtaataggggcgatcttcacgtgcctgcgtagcgtagaaaattgtgcgtttcgcctcttcttcggttctgcaaatcagggcgcctccgccagaagtagtgatcattttgttgccgttgaacgacagcgctccgaattctccgaaagtgccgcatttttgccccttgtattcagatccgatagcttctgctgcgtcttcgcagattggaatattgtacttttcggcaatggcgcatatttcgtctaatttggctggcatgccgtacagatgtaccggaatgatggctttaggatattttccggttttagcttttcgatcgtggatggcttgttccaaaaattgtggcgacatattccaagtttcctcttctgaatcgacgaagacgggtgttccgcccaggtaggttatcggattggctgatgccgaaaatgtgaacgattggcaaatcacttcgtctccgggacctattcccaattgcaaaagtcccaaatgaatggctgctgtaccggatgagagggcaacgatatgtctgccctgtccgatgaaagtttctagatctttttcgaatgcattaacgttggggccgagcggaacgacccagttggtatcgaatgcttcttgaatgaattgctgctcacagccgctcatacgtgccagcgagagatggatacgttgtttcataacgaattatttttgaatttccggagtcggatacgtgtggaaaatcgtttggaaaattagtttcagatctcctcgaaaagtgtgggtataatagtagtcgagattgatttgaactttgtccggaaaaattatttcattgttatattttacaggatcggggacttgtgccagtagctcttcctcattggcatatttgagcgaggctggtccggttattcctgggcgtaatttcagaatgagtttattttctccagttagttgatccgcatatccgggtacatcgggacgtggtccgacgaaactcatgtcaccgatcaatacattccataattcggggagttcatcgagtttatattttctcaaaacggcacccaaaggggtgattcggctctctcctgcaatggaaatactggagcctgaatggattacttgcatcgaacggaatttatacatcgtgaagagctttccctcttttccgacacgaacctgttggaaaatgacagggcctcccggcattttgattttgatcaaaatagctatgattagtagaatcggacataaacaaatcaaccccaagaatgatgccgtgcggtcgaaaatccactttgcgtccattgtaatgacaattatcgaaaaattttatacgcgattttttttacccaagcaggggcgatgagcagacagaacatggcataggcgaataagtcggcggtatggccgtagtgcaagtttttgttgatttgcaatctgtccgccaattgtttttttgcaaaaacccatccattccggcgctttttgaacaaggcttcggtcattctgaatttcaatactacgttcggaagatttgctatattcactccatgcattaggccgtcgtaccaaagcatcgtatcttggtttttccgatattcagggcggtaacaatgtccgattttatcaaaaaaacttttgcggaataaaacggcgggatgggcgaggggatttcttttcgcaaaaaatttcttgcattcggtgggagtcgctggataaacgattgttttcccggattcgcaaccttcttcgtcgatttcgttgatagcccctccgacgacatctatttcggggtgttcattcagaaaacagatctgtttttcgatgcgatccggcaacgagatatcgtctgcatccatacgggcgatgtattcgtaaccgttgtcgaaacatatttggagcagatcgtttaagacgcaggcgagtccccgattctctgcaaaacgtacaatcgatacgtttttgttattttcatacgcttccagacatgaatttaaggaatttcctatgggaccatctactcctatatatattcgacaggaataagtctgttttatgatgctgtcaatagcggggcggacgtattggggcgtatcgtttttataaacggggataatgacggcaacaggataattcatcgtgattagagttttgtatatttttctattatgtccatccactgctgcaaaacggtatttttgtcgactaagtgtttgattgtattggatgcgcgaagtccgatctcgcgtgcagccgtttcattttccgatagatatgaaaatgcttgtgcgatcgagtttgcatcgtcggcgaagcatccgtttatgtgatctataattagttcttttgcaccagatacttttgtactgattacaggcaatccgaggtacattgcttctatcattgcattcgacattccttcatagtcggaagataggacgaatacttgtgccgatttcatttgtgaagctatgttagcagacctgccttgtaacctgacacgacatccttttcgttctatatattcttcgagttcctgtcgcatagggccttctccataaatatctaagcagtgatcaggatgggttttactgaaaagtgcaaaagcatcgatcatcattttctggtttttttgaggatcgagtcgtccgacggagattattttcttttctttgtggctgcttaatgctgattgccattcgaattgttctgatatgggattggcgattacggatatgcgcttatggtattttgctggaaaatatttcttaatctccggggtttgtacaaccatatgttgcattctgaataagagcattctccgtattatttttcggaataggctggcttttcctgggtcatttcgttcggaaacaataataggtgtccgggtaaacagcatacaagccaatgttgctacaaacacaggtaacatgaaggcgataacaaggtcatattgccgtaaatatttgcgtagccacaataatttagccgtgatgtcccggtgatgatcatctgcaaatgcgagttttattgccggatttatgtcgtatgcaatcatccgttttcttaaacatacgatgcttacttcgtaggttttacaaagagaattagcaagggtagagaggacacgttctgatccaccggaggatagggtgtccgttacgaatactattttcatcaaaaggattactttttatcggatggttgaaggcatacaaccttttttatgaggttttcccattctgcgtatattttttcgggagagtgtgtttcgcagagtttatgcgcattatggctaagattgtctgcgaaaaattggtctgatagtattttctccattgcggtctgtaatgcttccacgtcgccaatgggggttagcaatccatttgtcccgttttttatcagaaatctcgcgcccccacctttgcagtcggtcgatatgcagggtactcctaaagccatcgcttccatcagtgcgttgggcataccttcgaagtcggatgaaagcacgaacagtgaagaacgttcgattttcttccggatttctgtcgtgtaaccgggaaagctgactttgtcggcaattcccaagtttgaggccaataattcgaggtctttccgcagcggaccgtcgccgtaaatgaccagtttgtaggctggatatttggctgttatacccgcgaatgcttttatcaggagagcatgatttttctgttcggtcagcctgccggaggaaacgatctgcttgtttctcggacctgagtattctgcggtgatgaactccttgttgatcgcattcggaatgatttttacggctgcgctgccgatggaattcccgtaccagtttttttgaatttcggtttggaacacccagccatcggctttatgggcaactttcttcaatcgcttttgtttcgaaggagggtacgtggagggatcgacacgctccgaagcgataattttggctttggtgaggaatcgaagtgataatagcaggattgtcggtatcggcaacataactatataacagtcgcatcgggttttgcggatgagcttgcatactctgtagaaacgaagcagattgtcgtgcaggaagttgctccgttcttgctggtgcaagagtgcttggcgacttatttttgtcgaaagcggatacgtcgcctcgtcatcggatatggtgataaattcgatatcgtgttcacgttggcagagaaaattggcgaggttgcaacaaactcgttcggctcctccgcccgaaagtccgcttgtaaagaaaacgatcttcatgttattatttacgaatcaattgcaacattttgccggtgttctctccgaacaaggattcgccgttgaccatttggcaaaaccaagcactttgccctgtcgtattgacttctataagaacaacggctccttctgtatcgagagacagatcccaggacagaatccctaagtacggtagattcgcatgcatttttagtacagtttcttttattcgagtcaaattccccccccctatgttgtagcctgagaatttgacctttgtatccgggtgaaaaacaaaatgttctccttgttccgaaaatgcttctttttttagtgtaccgtctgcgtttattccgatacatactcctccgtaatggatgttatcacgatcggatgaagatcggcccagcctcaatgcgatggggcaaatatggattcggtcgtcgaggatataggttatgacccgaaacgtatttacagacgatggattcaatgtggcaagaacgtccgcttgatggattaattcctgtacaacgaaattatttccgaatttttccagtacttcccgaacggccaaagagctgccgatgtcttgtcctccgacaaagttgcatatctgcacatcgcgtccgctactggtgtctatcgtctttttcaccacgcatttgcctcggtcgaataatgacatataggcttcggctggggataacagagcattgttcccgtttctgtatatgccttttacgcaggatagataggtttgggggatgtgaaggccttctattccggagaacaatagcggcaaaaaacttttgtcgcccaatatttctgcttctctgtatggattgagtttcggctccaatcgtgtcgaaaatagaatttcggggaaataatctttgcagtatatgccggtgtagctttggtacagtctgtgccaggccgtagataacgattttccgtagttttttcggaagaattcttttatctcctgcttctgggtttcagtcagggaaactttatcgatcaattttcgttttttttggatgttctgcctttccgaataggatacgagtactcgccggatcgttcggctgattgccgtcagatgattttctatcgtatgtacagtgcccattttatcttgttttaggtggtaatgtaagccattctccgaatttgtaatcccagtcttccggttcgaacggagtcataccgctccagtggaaaaaagtcaattcgccgaaatatactttaccattgacttcgtacagatccacacgtacctgcggataacctgcggataactgggctgccaattctttcattttgtcgaaattcagaggtttattcggtaatacggaggcgttgggatggccgttacggaatggaaggtggttgtaatcggcatcgaagaagtcgaattttgtttcttctccctgtgtcattcgatcggaggcaatgaagagtgctttcacttttccgtcaaaacagaagaatttatagtcacgcagctctccggaagcattgtcttccatatattgctcggcaatgatccggggttttatgtctttgtatggccattcgcgcattccccagaaaaaattatgccgcaggcaagcgttgattttgcgatggacttttttatagttcagttttgatttgtccttgcaaacgatcacaccgccgctgtcgtgcgtacatttcagcacgaaacgttcgggtagtttcgaaaaatctatatcctcgaatttctcccatacaccgagtgtggggatgaggtattcgtgcccgatgatatcgccgacgatggcctttacttcgtatttgtcgcacaactgtgtgtatcgtggattccggtcgtagagtttgagccattgcagtttttcgctgaacgatttcgggtgttccagatcgagttttttatgcatacgcgcccaaaaagcaatcttcagatatgatttatcacttacccagttgaaatattctcggtggcccaatgtaagcagcaataaggctggattttttataatatctgttatcgaatgggacatattagtcggcggatgttgattattttgtcatttgttttttgtaggcaggattagcatgtcgcccagttttttatcccaatctttcggttcgaacggagtcataccgctagtgggaaagaaagtcagttctccgaagaaaatatccattccgatcgtataaaaatcgactcggaggaatgggattccacaactaagtgtttctgccaacgatatcatttgaggtagagttgaaggcatagaaataatgcgatcgaattgtggtgggtatgctgtttcgaccaacggaaggatttctcccgttggggtataataattagcatgatgttccgtaaaacgatcaaaatctattttgaataattttacttttccgttgaaacagaagaatttatagtcgtataattcatgggattttttatcttctatgtattgttctgcgatgatgcggggttttatgtttttgtacggccactctccattatgatggaagtagtcttcctgcaatccggtgcgtaatccgttacggactttctgcacatccatttgctgtttgtctttgcaaatgtacattcccgttccgctgttgtgattgcatttgatgacgaatttgtcgggcagagtatcgaaatccacttcttccgcttttgtccatactcccaaggtcgggatgatgtatttttctccgatacgttcggctacccacttttttgcctctattttgtctgccataatagtatattccgggcggcgattgtatagtttgagccattgcaatttttcgttgaatgtgtggggggatttccaattgattcccccccccatttttagtcgaaactttaacgacagaaatagcttgtcagatagtagattacatccgtatagaaagttgagtagtttatgtaccaacagggatggacgggagataccccggtttattttcgaataaaaggagtgaagatattcgaaacgggctttttcagatggtataggatcttgatgatacataagaaataattttatttcaatttcgatacgactgtcctcaatttatcgagatgggcttcgcagttgagatagttgagtatttgatatctcttttttcgggtaatgaacgacggcagtaggccgtgtacgaaaagtcgtttggctgtgcgggtgcaatagggctggaatggaaccagaaaattgcgacttgttttttgtgcccacgtttcgaatgttgtgttcagctggtcttcgttcgagattatttggttcaacttgtcgatgcgttctgcgaaaattttacgttcggcttcgttcatcggtataacggaaggtcgttcgttgcattgtgtatacgggtataattcgaattgaggtaatgtctgtttgtcgagtcgaagcgataccatgaaaccttcgttccagggaccgtgacgttcgcttttatgatcgaaaagcagatttcccaagccatagaaaataggttttccgtggtatatttcatatcccgaataacaatgctggtggtggttgattattgcgtcggcgccggcatctataaaaaaacgataagtttctttcatgcggggagatggcaacgcgtaatgttcgtgtcctccatgcacgatgaccaaaacataatcggcttttgtccgtgcctcttgtatattgtaatattgttgtatcggatttaatggattggcgccggcggttgtgtccgttgctatagagaactcatgttcacaacaattcacgatcgctaatgttcccttctctttttgatttatgtacagaacagttgctgcttcagccgaattcttaccgatgccgactgtctttattccggcgttttcaagcagttcgcgggtttcaatacagcattttgtaccttggtcgaggatgtggttgttggcgagtgtgcaaacattgaaaccggcatacttgacggcatcgactgcggcgggctgcccttgtaatgtgggaccgcttttggcaattggaactcctgcgtgcaaaacgattgggaattcgaaatttatgatactgacatctgcctgctccgtgaggtatttaatgtcgtcgaacaacgaagcgtagttgccacgggcgataagatctgatattcggtatctatcgcaaaaatcgcctgctatcagaaggtgcatcatgatttagttagagaaatattaaagacttaagcaagatagttcgttgtgctaaatccaatattggatagatatgagtgctgtgtattaatcttgggattttctcatatataaagcgactgaaaggaaaaatattaatccgatgtatctatctatgtttgtataaaaatagctaataactccacattgcaaaatgatggcgatggaaaatgtgatgattatatttgatacgcggagatattggtcggaatatcgtagtctaactgatatattggcaattcggttgattatgaaagggaataagaagacgcagactctgccaatatcgactaaaaacaaccctaaaaatgtataaaatacatttatgttcatttgtgtgtttgcataagcgatattgttccaatcctgaactgagattttgtcctcggagaaaaagttgaaaaatggaaatatacgagataaagtccactctggattatagtaattattccagaggttacaaaagttcagaaatggttgtcctgcataaataatgaaacttccttcggcttccgcatctcgttctccgaatctagatgtggttacagcgataaaatatgcgattagaactgttagaagaatacttcctataatttttatataaaatttttgtctaacggagaatgatttcttaaaccagatataacataatacgaataacatcacccagtagaacgtattcgatctgtcggcgtaaagaattcccaatagaataggcgaggtcgaacttaatagaattaaacagttgaatattatttgtttgcgattgataattaggctataaaagaatagtggaataagaaaatatgcagaatgtcccaaaatcataactattgtagcgatgatgcgggaaataccagttagtgaatctgttatcgaagtagtcatcccattgtaggaatcaactctgatttctcctaaatctccgatgaataaattaaatacgatttgatcgtaaaaaagtaaaattataagaataaataccgatataaatataaatatcagacctttgaaaaaagtcgaatttttgagaggagcaatattgcttatatttaaacgattgctgttgtatttatagaacggatagatacaaaaagtgatgagaccacaataaataattgtaggaagaggagaaatatcgatttttgaaaaatatactaaatcatagtcatagttttggttgtataatattattgaaaaaaaggaggagattgcatagataaatatcatatacgcactcatgtcgaaccctcgttttcgtataacagcaaggagtagagttgtaaaatatataaatggaaaatataacattatttgagatggattttattgttgcttgattcctaataagcaatgaaaacgatgtacatattggagcttttttgtgaataaatatcctaatagaatgatgattaataagaacagataggctccttccataaattatcggttaagattgttgagtatctgattgattttactcggattcccatagatgcagggtgaatcgtaaggacggtcgggaaatgcaccgtattccaatttgattttcaaaccatgttcttggatgaattgttctacgcgctcggccaggcttatgggctgacctgtgcagcaatttatgataccggtaacttcgcgttgcataatgacggcactgattatttccgccaacttgtccacggtaataaagtcgtatttgttttttcccgtagtgaatggaaatgtttctcttccttcttcggccgcgaggagtaacttgcagaaaatggagttgttctttttatcatcgccgagaatataatatccccgtagccactgtaaaatacagcctttttgctgggtgtattgtatcatacaacggcggagagcatctttggcgatgccatacatggaaagagggttgcagggtgtattttcgtcaattgccccttcccagtagcctatttcgtgcattgttcccataacagcgagctgaggtaatccgtcatcgattattcgagtaaggaatcggtaatgggctgatagatctcccaggtgagttgaggcattgtgtacgaatccattgcgccaagccagatgtagacatacgtccggggttcctaataatgtatatatgtttgtatcgggaagggtgaaaaggtcgatgtttttccgttcggcgcgtttgtctacttcgtcggtattaagatcacatgctatgacttggattcctttatcaagtaatgtttttactatatgaagacctatatatccgttggctccggttactaatattttcattttgaaggaagattaaaatgtgtcaataaattgattataagtaattttcgatgaaattaagtaactcgatcggggacattttttctttataatgataatttatatcgatcgggtctttgatttttttgaggaaatcggagtcaatatcgtttggagaggtgaatgtagagatatattccagattgaaaaacggttcatttttgatatgcgggttgttggtcaaaagtttttttccaaggcagaccgcttcgcaagctctttgtgtaaagccgatgccatttttttgcattacttccaagatacaatgggtgtggaagatgtattgcaagttttcttcataagggatcgacttatttaaataagttatttcatccttatatttctggtcctgaatatcgacgccggctaatagcagattgggttttaagttgttgtctttgagaattgtgtatattttgaaaatatcatttaatctatttttggctttggccaacatatagacgtcgctatagggcattttttttatttttccgtgataggatgagtacaccaatgggtgatagatgaatccgtatgttgcacaatctcctggatcgaaggacagaaccaagtcgaattgcttctttaaattgttgcaatagaatggatgagtgcttgccagatcttgtaaaatgcatacgagttttgcattgggaaatttttctcttaagtatgttgtaatacctacgtcctgtttgatccaattcataaatacgatgaaacagaacggttttgaaactggaaacctatgtttgaaataagaatcgttccaagctgttttgaacggtaatttgaccaaacggttgattgtggggttaaaatgaatcctatataataacccttttaatgagttgatagggggatatggccctggaatgtactgtacgttgttgaattgatagagatcagaatacgaaaatttatacagatcccaatctgatcccaatatcacatagttgtatttatccattttgaacagagataaatttttggtagtaatagatcaatgtggtacagtatattatggagcataatacattagttaataatgccccttcggtattaaagagatagacaaatgtcgtatagccgaatattttgaatactccattggcaatgctgctgtttcgaatggctttaccttgtccatgagaacccagatagcgattgatcatatctccgaatccatggatactgaatcctgccgctaaccatactgcataattaccgacgctatggtattcttcggaataaaggaatgctattagcggtttgatgagtaagataaacaggatacaagtaccgacagtaagcagaatggaatttttgagaactttggagggaatacgtggttgtgttgcaaattgtttgaaataggtggtgccaatgatggcaggaagagttgatagtggtgtagttacggtcagtgctaaagtgtagaacccaacttcagtattgtcttcgttgaatactcctaatgtgattcctgccaggtaattggatgctaccataaataatgatcctatgtataattgtagtccgtatttatgattttcgtcattgagttctgtaaatatgtgttttacgttggatatcttaggatgagcggagaggatgataattaaaagtactgcagaatagattccccattgaatagatatcaccgattccggatcagctccccattgctgataaacaaagacggctgtaagaatatacaggagtgtcggcaacaagcgtgctatggataaacgtcctatgtggttgtctccttgtgaaacggtattgatatagttgagaagtagagggtagtaacatacgggaatcgaaattaaaaatagttgtgctatggcgggattagcgggactatgggcaaaataacatactaacatggaaaggctcaatacgatacaagccatgatgagtatgagtagcattgttccccggattgtacgggaccgcaattcattattactcaatgccagcaatcggctgccggacaggaaatacccgaatagcagcagcgaagcgatgaagttgatgatgttttgtacgtatctcacgtcgccataatctgccggagataaaaaacgggtgttgattatcgaggcgacgacgcccagtagaacgcccgacagggtcgaggcatagagtatgacgacttgttttgtctgtttcgtgaatttcatggaaccgattgggaactatcgcggcgtcttttgatgatctgagcgggaataccgctgcagatgcaattatcgggaatatcccggaatacgacggagttgggctgtatagctacattgtcgcctattttacattttccggttatcttgacaccgggacttaataatacgttgttgccgatgatagggcggttgtccggcgtcttatttaatccgatgacgacaccgctgtttatctggcaattacatcccattgacagacaatttactattactcccccccccttgaatgcgggatgcgcaggccggggccgaccatattcaggccgattgcgatttggtatttacctccgcgacgggaaagtcggattttccaatagcaggccagtagccggtgccaaagattcgctcgtgtattgtggtaatattcgcaatgtctcaatgcggtcagataatggaaggcaatacaggactccgatttcatgaatagtccgagcctgtatttcagaaagccgatcgatccgatattgcgctgccggtcggctcgaatataattttcgaggtcttttcgggagttaatcattgttgcctgttgtttgttgtttttcgtaccattgggcgaaaatagcgatcccttccgccagagaaacctgcggccgatagccgaaatcgcgttcgagttttgtcgtgtcggcgtaggtcgtgtatacatctccctgttgcatgggcatcatttgcagttgggcgttcttgccgagggcctgttcgagcgtatggatgaaattcatcagttgaacgggatgtccgcatccgatgttatagacttcggccggaataggacggtcttgtgtcggggccggggctttgccgatgacgcggaccatcccttcgatgatgtcgtcgatataggtgaagtcgcgtgaaagattgccgtgattgaatactttgatcggtcgcccctcccggatggctccggcgaatagcatgggggccatatcgggacgtccccaggggccatataccgtgaaaaaccgtaaaccggtggtcggaattccgtacaatccggaatagacgtgcgccatcagttcgttcgattttttcgtggcagcatagagggatacggggttatctacccggtcttcctccgaaaagggtgttttcgtattgccgccgtaaaccgaacttgaggaggcgtaaacgaaatgccggaccggattgtgtcgcacgcactcgagcaggttgaggaatcccacgatgttgctgtcaatgtaggcataggggttttcgatcgaatagcgtacgccggcctgtgccgccagattgacgacggcatcgaatttttcagttccgaacaggttttgcagggcctgtcggtcttcgaggtgcatttggatgaacctgtaagcgggataacgatcgctctgcaccggttgtcctttcgcaacgagattccggtgaatgcctgccgtttcgagccgggcgtatttgagccggacatcgtaatagtcattgatagaatctatgccgacgacctgattgcccgcttcgagcaatcgtttggataggtggtagccgatgaatccggcagaaccggtcactaatattttcatggttttcgaactttttaccggccttacgattttcagttttaggctgtatgttcaaaaatcgaccttctatattttacggtacaggaggccgaaatttcgaaaaaacggattgtgacttctcgtcgttcgaaagctatttgccgatcgccgcgtattcgaatccttcggcaatcacttcgtccttgctgtaaatgttgcgcccgtccaccaataccggttgtttcataacccgtttgatgaccgaccaggagggaattcggaactccttccattcggtcaataccgccagagcgtcggcgtcgatcaccacatcgtacatatctttgcaatagacgacccggtccccgattcggcggcggcattcgtccatcgctaccgggtcatataccttcacggaggctcccgcttcgagcagcttttcgataacgaccagagccggtgcttcgcgcatatcatccgtttcgggcttgaaggccaggccccacaaggcgatcgtcttgccccggagtgttccgagcttatcttgcagtttcttgactacgatctctttctgtcgttcgttgaccgcttcgaccgcttcgatcactcccatcgtatagccgtattcgcgggcggtacgggccagggccttgacatctttcgggaagcaggagccgccgtatccgcagcccggatagaggaatttcgaaccgatgcgggtgtctgcgccgatacctttccgtaccatatcgacattcgctcctaccagatcgcacaggttggcgatgtcgttcatgaaggagatgcgtgtagccagcatggcattggccgcgtatttggtcatctcggccgagggaatgtccatgaagtagagccggtagttgttcatttggaacggacggtaaagccgttccatgaccttttttgcccggtcgctctctacgccgacgaccacacgatcgggcgacatgaagtccttgatcgctgcgccttccttgagaaattcggggttcgaagccacttcgaaatcgatttgctcgccgcgtttggtcagctcttcctcgatgacggccttgactttttttgccgtacctaccggtacggtggacttggtgaccagaatcgtgtattttttgatgttccggccgaatgtccgagctacttcgagtacgtattgcaggtcggccgaaccgtcttcgtccggcggcgtgcctacggccgagaaaacgacttcgacgttgtcgaggcaggtggtcaggtccgtggtgaaatggagccggcccgcttcgacgttccgttttaccaggtcgtccagtcccggttcatagatagggatttcaccgtttaacaagcacttgattttttccgggttgatgtccacgcaggtaacatcgattcccatttcggcaaagcaggctcccgatacgagacccacgtagcctgtgccgacgattgctatattcattgattttgttttttagatttattgatgtttgcaaaagggggttgtcttgtgtgtcagaatcatgcactgccgggcttactaccggtttttatacatggattcgtagtatttctcgtattcgcccgaggtgatatggtccatccactcctggttttcgaggtaccagcgcacggttttttcgatgccctcttcgaattgcagcgagggttcccagcccagctcgtttttcagtttgcgcgaatcgatggcataccgcaggtcgtgccccgcacggtcggtgacgtaggtgatgagcttctcgctctcgccttcggggttgcccagcagccgatcgacggtgcggacgatgactttaatcaggtcgatgttcttccattcgttgaatccgccgatattgtaggtttcggcgatgcggcctttgtggaagatcaggtcgatggcgcgggcgtggtcttcgacgtagagccagtcgcggacattctcgcccttgccatagacaggcaacggccggccgtggcggatgttgttgatgaacagcgggatcagcttttcggggaattgatagggcccgtagttgttcgagcagttggtcacgatcgtcggcagaccgtaggtgtcgtggtaggcccgcacgaaatggtcggacgaggctttggccgccgaatagggggagtggggatcgtagcgggtttcctctgtgaagagcgtgccgtcgaattgcagcgcaccatatacttcgtcggtcgaaatatgatagaagcgtttcccctcccagttgccgttccattgttccttggctgcctgcaacagggaaagcgtccccatgacattggtgcgggcgaaggtgaacggatccttgatcgagcgatcgacgtggctttcggcggccaggtgaatcactccgtcgatatcgtacttgcggaacacctcgcggatggtgtcgtagtcgcagatgtcggccttgacgaaggtgtaattcggggcattttcgatgtcccgcaggttggccagattgccggcataggtcagtttatcgagattgacgatccgatagtcgggatatttgtttacgaagagccgcaccacatgcgagccgatgaatccggcaccgccggtaatgaggatgttgcgtttcatgtatttgctttttctgtttttatttctcgttgttcgggatgatcccggcggttcgcttcggcttaccggagagttgccatacagcgtacgagcgaatcccgccagtgggggatgtcgattccgaatgtcgttttgattttggtcttgtcgagtaccgaaaaattcggtcgttgcaccttggacggaaactccgcagagtggcagggacggatcttacaggaggtatggcctgccagcgcggcgatttcatgggcgaaatcgtaccaggagcagactccttcgttcgagaagtggtagaagccctcccgtccggcatagtcgccggattcgatgcggtcgaagatcacgcgggccaggtcggcggcgcaggtcggagttcccacctgatcgaaaacgacctgtaattccggtttgtcggccgtgagctgcaacatggttttcaggaaattcctgccgtagggcgaatagagccaggcggtgcggaaaaccagatgtttgcaccccgaagccacgatcgcctcttctcctgcgagtttggttttgccgtacacgcccagcggggccgtcggatcggtttcccgaaacggggtgttgcccgtgccgccgaacacgtagtcggtcgagatgtgaaacagcgtggcgtcgcacgctttggcggcttcggccaggttccgcacggcttcgcggttgatccggtcggccgtttcgacctcttcttctgccttatctacattggtgtaggcggcacaattgacgatcgcgtcgattcgcttgtcttcgatgaatcgacgtacggcgtttgcatcggtgatgtccaggtcggctacgtcggtaaagaaatagctgtgccgcgaagctgcgccgagcgtgcgcatttcgcggcccaactgtccgtcggcaccggttacgagtatgttatgcatagtagtcgattccatagtcgaaaagttcgtcggcatctttgagacggggatgtgtccggtctttgggcgagaggatcacctcctctgcggggagttgccagtcgattcccaggtcggggtcgttccaggcgatcgctccttcggactggggcgcgtagaagttgtcgcatttgtattggaaaacggcctcgtcgctcaatacggaaaaaccgtgtgcgaatccgcgcggtacgaagagctggcggtgattctcggcggtcagttcgacggcgacgtgtttgccgaacgtgggcgatccgcgccgtatatcgacggcgacgtccagaacccgaccctgaacgacccgtaccagtttggattgggctgcggcccccttttggaaatggagcccgcgcagcacgccccggcgggatttggattcgttgtcctgcacgaagcgtacgggccggacggcctggtcgaactgttgttgggagtagctttcgaagaaatagccgcggtcgtcgccgaagacctgcggctcgataataaccacgtccttgatcgcggtggtaatgactttcattatttttgttcgcgttttaattcgtcgattactttgagcaggtattgtccgtattggtttttaatcatcggctgtgccagcgcccgcatcttctcctccgagatccagcccatgcggtaggcgatgccttctagacaggcgatcttcagcccctggcgtttttcgatcacctcgacgaaaatcgaggcctgggccagcgagtcgtgcgtgcccgtgtcgagccacgcgaagccgcgtccgagggtctggactttcagttggctgtcttgcagaaagacttggtttacagtcgtgatttccagttcgccccgggccgaaggtttgatctttttagccacatcgactactttgttgggatagaagtagagtcccactacggcatagttggatttgggattggccggcttttcctcgatcgaaaggcagttgccgtttccgtcgaattccgccacgccgtaacgctccggatcatcgacccagtagccgaatacggtggccttgttctcctcttcggccgtgcggaccgcttcccggagcatcgtcgagaaacccgagccgtggaagatgttgtcgcccagaaccagacaggcggaatcgctgccgatgaacttctcgccgatcaggaacgcctgggccagtccgtcgggcgaaggctgttcggcatattcgaaccgtacgccgtaatccgatccgtcgcccagcagacgccggaaagccggaaggtcggccggcgtggaaatgatgagaatatcgcgtattccggccagcatcaggacggagatggggtagtaaaccatcggtttgtcgtagatcgggagcagttgtttgctaacacccttggtgatcgggtataaacgggtgccggagcctccggccagtacgattcctttcatggttattgaggatagtgatgatttatgttttatgcgggctgcactttgtcgaagcgttcgaattcggagtttttcgatttgaattccgggacgatctttttcatcaggcagaccgtatccgggacgtttaccattcttgcgaattgctcgagctgcccggtcgcagcgcaggcttcggcgtagtcgtattcgcgcactttggcgatacgtatccggtcgtgtgtcgtggggatcgtattttcggtgttcgagagtacctcctcgtacagtttttcacccggacgcagtcccgtgtattcgatcttgatctcttcgccgggttcgtatccggccagttcgatcatgcgtttggccaggtcggcgattttcaccgatttacccatatcgaaaacgcagatttgattgcctgtggagatcgttgcggcttccatgaccagctggcaggcctcgggaatggtcatgaagaagcgggtgatgtccggatgggtgaccgtcaccggtccgcctttggcgatctgttcgcggaaacgcgggattaccgagccgttcgagccgaggacgtttccgaaacgggtggttacgaacttcgtggccccctcgatcgttccctgctcgatggccagcccgagcgactgtacgtaaatttcggccaggcgtttggtacagcccatgatattggtgggattcacggccttgtcggtcgagatcatcaccatcttttcgacgttgtactccaggcatttcagagcgacgttgcgtgtgccgatgacattgaccagcaccgcttcgcagggattttcctccatcagggggacgtgtttgtaagcggcggcgtgaaatacgacttggggatggaacgtgcggaaagcgaaatccaaccgattgggcagccggatgtctccgatcacagggacgaattccagcttcgggaagcgctcttcgagttcgagccgcaggttgtgcatcggagtttcggcattgtcgaacaggatcagttttttgatcccgaacgatgccagttggcggcacagctccgagccgatcgaaccggcagcgcccgtgaccataacggttttctctcggaaattggcccggatttcgtccagtgaaatcttgatttcggggcgccccagcagatcttcgatcttgatttcgcggatcgactgccgcatgatcttgccgtcgatgacttcgtcgataggcggtgcgatcaggattttcagattgctttcgacgcagtagcggatcaggcgctcctgctcggcctgtgcctcttcgttggtggggaacagcacggcatcgatgtcgtatcgttgccggaggtatcgaatgctgtattcattttcgaaataatagaccggacactccgcgatggtgtggtttttcatgttccggccgaaagtcaggaatcctacgatcttgtagtgcggagaactctgcagccgggtgaccagcgataccgatttttcgcttaatccgtaaaccaacaccaactggcgctgtttgcgggatttcaggttgtttttgaccaggtcgtacacgataatcatcgctacccggatcaggatcaggccgcaaagggtcagcagcagatcgaacagcagcagagccagcatatgcataccgaacagcggtgtaggtgggtagagcagaatggtcagccccaacaggagctccttgccgatgaccgccacgacgaattttgcgatttcccgcagcgtggagtggcggatgaccgaccgataggtcttgagcaggaaaaaggtgatgaacgaatatacgaccgcgcagccaatccataacagggcgaatttcgaaatgttggagaggggaggaagcagcaatctcaccaacaccagtgcgcatagcaaagctacccccgatacgaccaggtcgatggcaaggatcaatctggagttcagatagcgttccaagtgcaatttttctatcagacggtacatggttcgttagaataaatattttgcaaaggactgattgttcgtcagctcttgtcgtgtatgttgtaatctgtcgattttcgaagcgggccgtattcggaacggaacagggcgtcgagtttaagatccgcaggaccgctgtcccgttttccgacaattaccgtgcaactttcattgttcgaggcgcgaaggtcagttttcgggtattttttccaggaaacgtcccgggatgtaggtcgtcgctacggcgatgatgccttccagtgcgacgaccaggcggcggttgccccggatccgcttgatgtacccctcggctcccttgaacgggccgcccgtgacccggaccttgtcgccggaacggtagtcgatcgcttcgtcgctgaaatattccaggtcggaagtgtcggcggaagtgatctgcatgaacagttccatttcccggtccggaatgactgccggttttttcgtttcccggtcgaagtaggccatgaacggacaactcgctttcatccggtcctgcaattcgagcagatagtgttcgctttggcggatgaacatcagggacgaaacggccggtttgcgtttccgtatctttttgtccccggcgactgtgtcttcgcggagcaagggaatataactccgcactttttcctgcgagagctgtttttcgagttcgaatacccggttataaaatactttcagtgcataccagcactcttcgccgtttttgtctgacataatttggaggcggtgttaggtcccgccgaatgtcccgaaatcgtaattgcattgctccgggtgcgcccttcgtctgtcgatcttgtttgcaggtccgattccttttctcctgcggccgtaggcaggtgcgccggttttgccgaatccgaccgtagaactctcttgcagatctttcggggtcggaagaggattcggtggcgtatcgattcgctgccctgtgtctgttttctcggaggagcggtgtgctaaaagtatgtaccgtatttgtgaaaagggcatactccacaatcccccgcgacttttgtgtgatttccaccgcgcagcaactaaaggttggccgcagaacgaatcgtgtgcgattctgttttcggcacccgggatctctgtttctgacccagaaacgacaccgaacctctggaaacagaagcctgccttgcctggcaggtcatttcctgttacaaaagtagagtttattcgcgtaataaccaaacaaaaaagcgcaatttcccccccccggaaaaaagtctatatttcaagcttttacgactgaaaaacgtatttgttgtgtcttaatatgcaatcaaatgggttttttgttctattggcttctgcctccgctatttcgcctgataagcctggttttggaacggtctgtgtaattatccgatctggtttgttgaggttatccctctgtttttcggttgaatagcctgcgtttgtattggaaaccctatttcccgattttatcggaaggtagcgaaagtatcttcgaatagaggatccgggcgcaggcaatccgctatggccgggaaatgaatgacaacgatcggatttgatttttttccgttggcgtgcgtggactttttgcaccggttgagaagataactttacgtcgttgttcgaataaaaaaatagggtcggagtaaactcaatcctgttttatcgttttcccggtccatccgggtatcttttgttctgcggagagaaggggattgacttcgtgttaccacgtgccgctcgtccttcccataatggaagagtccctgcaaagtcgatgaataaacggaatccgctctttacacggatactttttcacttttccggagtgcgagaactcgcttgcagacgctctggaaaaataaaaaggttacgcatctgtcgtaaccttgttttatttgtaaaatcttaatttgcggagagtgggggttttgaacctacaaatctaaccgcttatatttcagctactttgctttcaaaatttcaaataggtaacgaaacagtaacgattttcagatgttgggcttgtccaactttgaccgctgtttgtctgcctaactttcgggttcaaagatacggctttcttttgaaactcgcaaatatctgataataaatatttttgggttagtgcaaggtgcaagctatatatataaatatatacttgcaccttgcactaaaaaaaagcactggggtacaaatgcttaaaacaaaatccgtatcttcgtaaccgattaaaaacaaacgtgtatgataataactaaccgtgaagaagtaatagataaagcgttcggcgtatttgtcaggatgaactacgagaaagcaagcattatcacgcttgccaaagcctgcggggtgacaaaaacgggtatcgtttattattttccgcacaagctggatttattcatggctgtggcggacaaatacgtgttgcaaatgcacgaaccggaaaacaagtttgccgctcctgccgatacgttggcggagttcatcgggcaatacgtggcgggggtagccgcttccatgaaaaggattgttgaactaattggcgataatagcagcccgcatgattgtagtcctaacttctactactttcactttctgtcacaagtgcgcatgtactatccgggcatcaggcagaaaattgagaaaatctaccgacaagactatgacctatgggagaaagtcatacagaaagcaaaagaaagcggggaaatcaggagtgacacggacgtgaagaaaacggctatcatgttccggcaaatgtttttaggactgtcatacgaacaagcatttctaaacggtttgaacgtggacgaactggcagaaaactttcgctatatctattcgctgcttaaagcctgatacagttttgtttttttaacctctattatttttgaacgcatgtttaagatatggtgtttttgttttatctttggagcatgaagcaaaattcagcgacatggataatgttcagaaacaaagaggaagcatcgtgctacacaaagaaacaagggacggtgcggactacatacggatagaatatgcgaacagtcaggctgtcgccctgctgctcgcccaagaaacgggcatagaaatggctggcaacggctctgcatacatagcgtcagccgctttcagcctgtcggatttctacgaccgctattcaccccacgcctatattgattacagccgggtttacgtgcggcatcccaaacccaaaagggaatacacactgccgaaaggctatctcgaactgctggaacaaaagcgttacagcccctcgaccgtcaaaacataccgtgcttatttcagcgacttcatggaatatcacaagggacggaacatcgaccgcctgaaagtgccggacatcaacaagtacatactctatcttgtgaacgagaagaaaatttcggtgtcgcaacagaatatgcgcatcaatgctatcaagttctattacgagcaggtgaaaggcggcaagcggcaatactacggcggtatcacccgtgccaaagagtacaagagcctgcccgaagtgttgagcaagaatgaaattaagcgcatccttgaccagctatccaacatcaagcatcgctgtatgatttccttggtatactctgccggattacggcgtagtgaactgctgaatctcaccccaaaagacagcaacagtgaaacgatgtccgtgcgcatcatgggcaaggggaagaaatgccgttattcgctgctttcgcccaagctgttggaagaactgcgacagtatttccgggaataccgtccgaagaaatggctgtttgagggcgaaacgcccggagttcaatactcggcaagcgcattggtgaaagtgctgaaagaagctgcacaacgtgcgggtatcaagcaccgggtacatgtacacatgctgcgccattcgtttgcaacccacctgctggaacaagggacagatttgcataccatacaagaattgttgggacacaacgacatcaagaccactaccatatatctacatgtgtcaagtgcgcacaaatcccaaatacccaatcctcttgattcactggatgattcatagggtgcagctattagagattaggaaatacacctgctgggtgttgtttaccaaaatatacagcaccttacgggtgatcttataaatacattagtaataaatagcacaatcaatatgtacgaaaaatttttagataagagcctaaacagcactcgccaaacggtagatgatacttttattgcaaaatatgctaatgcggtatcagaaaaaattatcgaactttggaaagaagttggacttggaacgttttgtgatggattgttcagaattattaaccccaataaatatcagacaatagtagatgatagttatcctctgtatgagtatgaaactgtaactccatttatgacaactgtttttggagatatttttgcttatgttaagaatcccgtgataggagattatgtcgtattcatcaatgtgagatacggaacattcaagattttatccgagaatgttgatatactattgaatgtggtaattttcaacaagagttgtttggaatcatggttctccttaaataaatatcctatgataaaatcagaaaaggatgttcctacattggatgaatgttacggatatgtcccagcattggtatcgggtggtatagaatcaatagataatatcaaaattctaaaagctattccatatatagaaacggtactccaatttattggggatttgaagcgagtgcgatagaatatattactaacaaaccgggataacggactaacgtcgtttcccgcttagccattagcaacaatcaaatcattatcgttattatggatatagaaagaatacttaaaacaagagaaaatgcaatatactacggcattggtgaataccaaaaagactgctttggttgggttggtggaaatgctccagcttgttttgatgataagtatttatcggacaaagataatctctatttttatctaacatttcaaaaccctttaaatcccaacaagcaaatatctattttcactccggaatttgatgttgcattggaatataacacatatcccgattgtaaattgttgttggttgaacatgaattaagtagtcaaagcaaaagtgatagatataaacaccccgaaatagatgaaatttattcaatatacgaaatgagtacagaaaaagatatgcctgaaaaaaattgtgcaatcaaatttgggggtaatgtaatgcctattcaatggggattagataatgatggtaaagtggttaaagatggaaatagcttcatttttcaaatcaacgaaatttgcataaaagatatttctgttttcatggctggctgtatatatgtttatggaaaaattgaaggtaataaagtcacaaatccatttgtggcatactgggaatattcctaataacgataaattgattaattatttcaaataggttgctaacaacgaaagatagcatctgacgatgctcctttctaaccattataaacaataaagccaatggatataaagaatgatatacatattatggaaatgaatgacaaactgtatcaacggttaaaacagtcagagcttgtcattcatgccaaagttgaaagtgttttacgacaaatctcttcatggaagtatgctacacatgaattttatgttcctgctccctatcaaaatgaattagcgggtttaccaaacggacgaatacgaaaaaatattgaagaaaaagaccgtctaaaaatagctggtctgtattcttttggctttaatgcagaaggaaaaatactttgttcgcaagaagctccagataatataggaaatggcatcataactgatatatatgagtatgataatgccttttcatattatgtatatcatgttaaatatatacccaatcaatatacaaccataatctcaataagctatttttatccataccatgaaatgaatatctttcagggtataaattcatataaagattggtcagtgtatttatatgaatatgataaagaaagaattagtaaagtacataggtatgcttctcgttgggacaatatgccagcagaggaatataattttgcctatgaaaataatcttttatgtgcaatagttggagagaaaagactaaagaatggagaattatatatccattggaaaaataaaaaagtttataacaaggaaagataacccctaaacggcgttcctttccaacccattataaacaatatgtatcgcattgcaaacatagtactatttgttcttgccattttcgtggtaatgggttgctcttgtagtaaaactctgtgtgaacgtaacatacaagatgatatactcaatattgataaattccgtaaacaaagtaaaaaagagtaccgctatatagaagaagatgcggaaagattgtttgcaaattcggcagcggtttatcccgatacattataccgccaacaatatacttcattgcaaggttatttctatggagaaactggatttgacttatattgtatatggtatgcacagtttaatgccaataataggaaacactatcgttgtgaacgtaagacattaaacaaaatattctattgtgtaaatgatatgttgagatgtattgccgggggcggaactggctttgcacatgaaacataccgcataccagcatacacagagtattacatctataaatatcagaatatggaagccaataaacagtaccaagataatgatataagccaaacgatttcaaatttatggcagataatggctacatataataacgaagatatgccctttgaaatattagcttataaaatgaaatacatatatgaaaatgtggaatatataaaatcattacttactgctgaaatatataattattgcctgcaagaatatatgtgcagactaataaacgaaaatgtaagtgagcaagaacaattaagtttataacaacgaaagatagcatctgacgatgctcctttctaaccattagtgataattgtgtaaaatatggatatagcaaaaattatatatataagtttaacaatgctgacagcatgggtatttatggatacagcatttccaatggatacttataagcatcttttgggagttataggctcttatatatgtgtaggctgttctgcgctgtttgcaagctggtttgcatggcattgggtacaccctttttcttacgttaagtatttattgtgtgggttgcttactacgtttttgtttcatgcaggcttaactattggttgcagtgttccaattatcattttatcttgtcgtggagttcatgtgataagtacagcacctataactctgtgggaagtattaagctatattttaagcattttcattatgtctttctattttgtgggactttttacttttggactatgcttgctaacagcgagtattacaaagatagtaatatggagattgaatataagtaacaatatcactaacaacgcaggataacggcaagccgttccctgctatacattaacattataatcttcaaattatgcgattaaacagtaggagaataataatttatatcggaatagcaattttattgattataataattgctactcgctgtctggattttttcttcttttttaatgaggataatagaagatatacaataggcacgttttctgacataggatattatcgtggttcaatctgcaaatttaattacaaagtgggtgattcaatttatattgttgatacaaggtttggactacatgataaagatttgaaaaatctaagattggttgtcaaatattcaaataaatgggttgaacattcagagctacttttagaggttgttcctaaatgggtgcttgcaccacccaaaggcggatgggaacagttccctcctgacataaactggaaaggagctgaattagatactgcatatatgaagaagatgaatttggaaataccataatttgatgagaataaaaatagaatgttaacaaggtcgagataacagctaaacgctgttgctcaccaaaccattataagcaatagtacatcaaattatgaacgaacaagtacaagaacattttagctgtgctgattggctcctaatacctgcatccgttagaaaagatgttgcagacatattgggactaacccttttgtctgaaaatgagcagtgggataacaacccaatactttgtactacttatgaaaatgcagacaattatcttaatgaccttttaccgagggttgataaggtattgatttcgtcattcattaacggatattatatcattgaagggaaatgtttgcgatatatctacgaaacattgagtaaaaggttttcagcaaaatgtggtgtctattacttctcgatagatttatgggaatatcgttgcgcttatggctattatgagagaagccaagaaaagcgtttttatagtgccgaattagatgctaccggaaatctacaagaagaagacagaggatgtgtattaagttgtgaaaatgacgcagaaagccatataccaaaggtaaagattgaggacgagcaagttcctaactcttggtttcttcctttaggtataatgtttaacttagggataacggatgcagagatacagcaaactctaagtaaactatgcagcatatatatgctggatagcacagatgctaaaatgataaagaatataataacagaaaaatttagcttataacaaggtcgagataacagctaaacgctgtccctcaccaaaccattagcaacaaataaaaataagaaatatgaactataaaacaatgctcgcaaaagttcttggagaaaaagaacttatggaaatgaatgtacagactattaaagacgatgaaagcctgttctataaattagtggataaaaatttcctcttaatagtggattggagtggagaagatagacaaggaatgttgtataacttcttcaacaacagacttcaatcaatgttgggggtacaattggttgtgtccgaagatgaagtttatcaaaaatataatcaagaaatagaagaacccaaacgaggtgatttcattccatttgcgttatcctattttgataagcaattggaaaagcttggggcaagagttgtattgcttgacttagaaaatgacacttataacatattggtggcttataaaaaagatgccaaaaaactaaagtctataaaatctgatttttggaagttatcaactttagagcaaaagcaaggtcgagtggttatttccataacctgccctaattgtaaagattttgcatgttatgacatgttgattgaagaggaaagcaatatggcaaatgaaaagtgcgaagtatgtggaacactcttttgggatgaaaatgcaaatgaagttgtagaaatggaaaagacttattattaatgtagttgctaacaagcacctgtgccacttaacagtggcaagctgcaaaccattaacattataatcttcaaattatgcgattaaacagtaggagaataataatttatatcggaatagcaattttattgattataataattgctactcgctgtctggattttttcttcttttttaatgaggataatagaagatatacaataggcacgttttctgacataggatattatcgtggttcaatctgcaaatttaattacaaagtgggtgattcaatttatattgttgatacaaggtttggactacatgataaagatttgaaaaatctaagattggttgtcaaatattcaaataaatgggttgaacattcagagctacttttagaggttgttcctaaatgggtgcttgcaccacccaaaggcggatgggaacagttccctcctgacataaactggaaaggagctgaattagatactgcatatatgaagaagatgaatttggaaataccataatttgatgagaataaaaatagaatgttaacaaggtcgagataacagctaaacgctgttgctcaccaaaccattaacaaacatgaaaaggtcatttattctcacagaaatatctagcataggcatctgcctactgctgataagtcaaatgatgttccctgaaaccttcacgggagcatggttcaggtatgcaatacttgcactgatggctattacacttctatccacacaaaagggtgaacgtctgagggtgtacgacaggcagcggcaactgtgcctgactccgtttctgtggtgctactggtgggtggagaagatactgatagggattgccgtactgtgcctgtttatgagtgaatggaacgcgcagcccgccctgtcggttcttctgccatttcttatcggcatctacttgggactgaaagcggcggtgtatctgatagagtatgcggtacggcgttccccgcttagccattaatagtaacatgaatatgacaaaaaaagaaatttcagtacttgtcgtcaatgaaatgtctttcactccccaaaatagtaatggtattagtatgcttcattgtataactgatgaaggatattataaaatcacaaagggtgagatggatgaaaaagtttatatggaattaaatgatccttcaaatggagaatattttgatacggatttttttgaatataatatctcaaacggtagtttgttgatttatgtcaatgagaatagaccttggaatgctggtatatatcaacatatcaaactattgttttctccacttgaacaaaacgattttaacgaattaaaattgacgatagaaaatttattattcgatataacaataagaaaattattacttgatatataatatgtctaacaagtcaagacgcagctcttgtcaaactagactgggaatgcacagaatatttggatatttgttttacaagacagaccgttttgtccggcggacaagcatgggaatattcccatggtacgctacgggcgtgatcagccttgccctgacgctttacgtactcgatgcgtgtctgatttatgccgcagccacaagcggaaatccgctgccttttttcaaactctccatgccgatagtgtggtttgccccgcaaatctattattactacaggataaggtatctgaaaataaggcaagacaagtcgtatgaaaaatattccagcgtttgggctatcttgtttttgctgtttccatttgtctttttgattgtattcgcacttattggagatagattttacatgccatattaattttaatgtcattgaaatatggaacaacggatcacatcactgctgctatccgcttccaaagcggggctggaagcgtcctgcaaggaattggataacaaggtaacatggctgctgcacaacagccggaaaatggacaactacttggaacttgaaccgttcagcaaggacgggcgactgtgcgcccacgtgtgcgacacgctcaaaagcctgccggaaacgcccacactggcggcatacaaggactacaaggcaattatcatcttgctgggtatgtccaccacccattacgccatactggacgaactggcggaacaacaccgcaagcgggatgaaatatccgaactgaccgcctactgcgatgcgctccactggatgcggtcggggcgacagtacctctacaacgtgtacaacacggtatgctacgctttccacctgctgcggagaaacccggtgaggaacaaccgcctgctggtgacggaaaaggagctgcgccacgccgaacggatgctgcccgaactgggcaggcagacgttcaccgaaatggtgcgtctgaaaggctacaaggtctatgatgccgaagaactggcggagaaatgcagaatggaatacggctcgttccggcgaaaagtaaagcggctgacggggtacacggcaaagcagtgggtggtaaaggaacgggcaaaggacgtggaacactacctgaagaacaccaacctaacgcttacggaagtggcgttcaccaccgggtttgcatcgacatcgaacctgaacgacttctgcaaggcttacttgctggacacgccgggcgagatacgtagaaaagcgcaggaaacaagaaaatgcacagttacaagaacgtaatgtgaaaaatcaagaataaaacagattttttatgcccgtaactttgtgcttcataaaagataagcacaaggttatggaacataagataccgttggaaacatacttcgccggactgcttcaaaaagtggaatggcagatacaggaatacgaggacaccgcagcggacacgctgacgctctgccgcctgtgcgtggactacctacaagagatactgggcgaactcaaaaactttataatctcctacccgttcgccagcacggaagaggaaatacgcttcttcaaggaactgaaaccgcttttagcgagcaaaatcatctattacaacaccgtttacaagatagaggtacgtttccccagcggcagcgaggaagtgcaaagggactacctgctgtcggaaaccgaccggatttcaaagtcgttccagcggaacttggcgttctaccagtaccaccgaacgaaagccacctacttggacaggcagtatttcatgcgtgggaagcctgacatacaaatcatcgtggacagtttctattacgaaacagacccacagttcagcaccagtcacgatttcaaggtagccaagattttagccaacgaactgctggaaatatacctcaccaaccgtctgcacgagctggaacgccgggaacaacgcaagcgggtgaagaacggcttcatgggaaaggtgttgcgctggacggggacgaaaagggcgttggtggaacttatctacgcactggacgcctgcggctgtctgaacaaggggacggttgatattaaggagattgtagcctactttgaatacgtgttcgacatcgacctcggcgacttctaccacacctacatggaactaaaagccaagaccaaagaccgaacgggcttcctctccaccctgaaagacaggttgctgatgcgcatgagggagcaggattaggcaaccgtgctttaacaaaatttatttcgccacaggtgggtacatctgtggcgttttatttttcaggacacccgaactttgcggcaaatcaatcagttaccgttatggaaataataacattcgagtccaaagcctacaaggaactggacaacaagattaccgccattgccgattacatcttcaaccacatggaaacggcaaggcaaagcgaggaagacatgtgggtggacagctacgaggtctgcacgttcctgaaaataagcgaaaagaccctgcaacgcctgcgggtgtcggggactatcgcctattccaacatcaggggacgttacttctacaaggtcagcgagatacgccggatgctggaagaacgcctgataaggagcaacaaggagaacatcgacaacctgattaccaaccaccagttgtatgctaaagaaagaggaaatcttagaaagaacaagtaacgggctggcggtgttcaaacactacctgcccggcaactggcgcataggtcgtaacttccttaacccgctgtacgaggacagcaaggcttcctgcaacatctatttcgaccgccggggcggtatctacaagatgaaagacttcggcaacgacagttacagcggcgactgtttcttcctcgtggggcagttaaaggggctggactgcaaccgggcggctgacttcgtggagatactggaaatcatcgaccgggatttgggcttggggatggcttccggcactccggtttccgttcccccggcaaccgtccgccgggcagtgccggacaaagccgaagaaacgcccggaaagcccgtcaagccctaccagttccgggaacagaagttcccgcttgccgaactggtgtactggcaacaatacggcatcacgcccgaactgctggaacgttacaaggtctgctcgctccgggaatacaacagcgaaacggcagagggcaaaccgtacacctacacttcatcggtggcagaacccatgtacggctacaagggcaaacagcacatcaagctgtaccgcccgttctccacgccccgcttcctctacggcggcagcttcggcgaaaattactgtttcgggctggaacaactgccagccaaaggcgacacgctattcatcacgggcggcgagaaagacgtgctttcgctggcggcgcacgattttcacgctatctgcttcaacagcgaaacggtgacgataccgcccacgctggtctatcggctgacattccggttcaagcacatcgtcctgctctttgacatggacaagacgggcagggaaagttcatgcaagcaggaaaaactgttggaagaatttggcgtgaaacgcctactgctgccgcttccgggaacgaaagaggaaaaggacatatccgactacttcaaagccgggaacacccgtgaggatttcctgaaactgtttatcgaatttttagacaacctgtatagcgacacattgattatgcttaaatcgtgcgagatagatttcaacaacccgcccgccaaagcgcaagagattatttcggcgggtgacgttccgctggggacacaaggcaacctgttcggcatcaccgggggcgagggaacgggcaagagcaattatgtagccgcaatcgtggcgggctgcatctgtccggctggtgcggacatagatacactgggcatacagataaccgccaacggcaggcacaaggcggtattgctttatgacaccgaacagtcggaagtgcaactgttcaagaacgtaagcaacctgctggcacgtgccaaacagccggacaagcccgatgaactgaaagcgttttgtcttaccggcatgtcacgcaaagaacgcctgaacgccattgtacaaagcatggacaagttctactaccagtacggcggcatccagttggtcgtcattgacggcatcgcagaccttgttaagagtgccaacgatgaagcggaaagcgtggcggtgatagatgaactttatcggctggcgggtatctacaacacgtgtattctgtgcgtgctgcacttcgtccccaacggattgaaactgcggggacatttgggcagcgagttgcagcgcaaggcggctactatcctgtccattgagaaagacgaagaacctacccagtcggtggtgaaagcattgaaagtaagggacggtagcccgctggacgtgccgctgatgctctttgcttggaacaaggaagccgggatgcacgtgtacaagggcgagaaaccacgtgaggaaaaggagaagcgcaaggaaagggaactggtgaatgtcgcacgtgacatcttcgggcggcagacacgcatcacctacatagacctttgcgagcagttgcagcaggtcttggacatcaaggagcgcaccgcaaagagctatatccgcttcatgcgggaaagggacatcatcaccaaagacacggcgaaccaaagctgttttgtcatcggttcatataatcttcaaaggaacgcaagttgtccataagcgtatggatgaaacttgtgtaattcatgtgcttgtgtcctgccctgttgtgataacacggcaggattttttctgtttacacgtgattttttcagggtatttgcttaactttgcagaagttacacggaaaagtaacggcagttggacggcggttgccggaatattgcctttatatataacatatacgttcgccgaacgtcccgatgcgaaaactggcacttttcaaaatgtggggatattcagcgcaggatatgctatgcgtttgtcatagcgtggctgcactgtttccacatttaggtatgccagtacctcgcatcgaaacagcgtcatgccacgctttctttttttttgggggggcggctaacgtgccaagacagtagggatttatatcactttaatacctgataatatggaacaaatcaaagcgcacatcgccgtatcgctggacgggcataccgccacgccggactatgaactggactggatgccccgtgaggtcaaggaactggcggcaagggaacacgccgccgcaagctgcctgcttatgggggcgaacacctacaactacatctttgaacactggggcgggtggccgcacaaaagcaaacggtcttttgtggtgtcacactacgacaccaacgttacaccggactgcggggtggagttcctgaccgaagaaccgctgcaaagggtctatgaactgaaacaggaaaccgacatgctggtggtgggcggcggcaagctgcttacttcattgattaaagccggactgctggacagcctgacaatctacaccgtcccggtcatggcgggcaaaggcatcggctttatcggggaaacatccggctcgctgtggaagctctcggaaagcagggtgctggataacggggtggtctgttcgacctacctgtttggcgggaacatataaaaaatgcgcccggtttccctccgggcgcaaccactaaaatttcaattattataagctgtaaaacctatcacaatgaaatttcagcggcaaagataggctatttcttcggtttcgctttcttttcggggaatgaaaaaccgacattgaactgctcgtccagtaccagcgaagcatcgaaagccttgccgttcttgcccttgaaccccttgattagcccggtcttgcgttttgtcgccagctcgacaatctgcttgtcggaaagctgcttgtcgcacttgttgcggaatatggtaagcgtgcagtccacgttggaacacttcgccactttcgggtagaacaggatgcgcccgctgccgcatttcgggcaggggcaggtttcaccagtagcgacagatagctgcaccgatagcagttctgcggtgatttgcgttgcgtacacctcgatgcccttccggaacgtgtcggcatccatgctgcccgcttctatcttggcaagggcggtttcccacatgcccgtcatttcgacatcggcaatcttcttgtccctgacaatcccataaacggcaagccccttgtcggtaggcacaaggttcttcttctcacgcacgatgtactgacgggcgaacagcgtttcgataatcgccgcacgggtggcgggcgtgcctatcccggcatctttcaggctggctttcagttcggcatcttccagttccctgcctgcgttctccattgccgacaacaggctgctttccgtgtgcagcggtttcggcttggtctgcttttcgagcagatccacgccggagagtggcaaacattctccctcttggagtggcggcaggctggcggcttcttcatccccgcccgtttcctgctcgccgaacacggcacgccacccggcttctttcatcacagaccctttcaccgtgaagtcggtatctccccctgacagcaaggcggtggtaacgtctttcacgcacttgcccgaaaaggcttccagcatacgcccggctaccagctcgtaaaccgcccgctcgtctttggaaagttcgccgggcaggttctcggtaatgattaaggcgtggtggtcggtcactttgccgtcattcacgctgcggcggttcaggggtgtgccgtccagcccggcggcatacccggcaaagcgggagtattgccccagcagggcgacacgttccggcatttcatcgaaaacgtcctccggaatatagcggcttccggttctcgggtaggacatcactttcttttcatacaggctttgcgctatggaaagcgtcttgtcagccgagaagttcagcttcgtgttcgcttccttttgcagcgtggtaaggtcgtacaaaagcggcggttcttggcaggcttctttcctctcaacggatttaaccacaagttgcccggcatcctttacccgttgcagggcggctatggcttcgggctgccgttcccacttggcggtcgattgggcggtaaaatttattcccccgctggcggtatcggctttgagttgccaaaacttggcgggtacgaaattcttgttctccaaatagcggctgcatatcatcacgagcgtgggtgtctgtaccctgcccagcgagaacaccccctgcccggctgccacgctcaacgcttgggtggcgtttatccctatcagccagtccgcttcgctgcgggacttggcagagaggtagaggttatcgtaacgctctcccggctgcaagttatccagcccctcacggattgccttgtcggtaaggctgcttatccacaggcgcacaaatggtttccggcagttcaggtaatggaagatatagcggaagattaactcaccctcacgtccggcatcggtggcgacaataatccggtcgcactggtcgaacacttcctttatcactttcaactgtttcagcacgccggggtctgccttgtaccctttctccgctttcacctgacgggggattagctggaaatcgggcggcagtatgggcaggctctcccggcggaagttcgccacgccgtaagcttccggcatggcaagctggattaagtggccgaacgcccatgtcaccatatacccgttgccggaaagataaccgtcattacgcccggtcgcaccgatgatgcgggcgatgtcctttgccacgctgggcttttctgctatcaatgcaatcataattctttactttttaatggtggatattacattttcattcctctggacttcttgggcttgtcagctttcaggctcttgtcctgcgctttctcctgcttctctttctgcttggcggtgggcttgtcctgaccctgtttcaacggctctttgccctgcttggtggcttcgttggtcttgcccccggaattgaccgctacctgcgtccggctctcggcggcgggggtaacgtctttcggctgcaccttgtcgggggatttgccctgtgcgccggactgtacatgaccgttgaactcaacgcccttgccgtcctttaacccggctacctgctgctctccgggctgctgtccctgctgcaagaactggacggcagacctcggcaggaactccaagccacgctccaccgcactgacctgcaaataggcactgcgcttcgtgccgtccctgaattgcaggttttccattttcaccgcttgcccggcttcaaaggcggctttctgttccgggctgacttgtacgttacagattgtatcggggcatttccacttgtcagcccgcatatactccagctcgtgcgtgtacctgtcccggctgacgaacacggggatttgctcgccgcttttcgggtctttgatttcagcgatgccgcccaagttgccagtgccttgcaagttgtcctgttcctgcttggtgaactcgtgttcatggaacgggcgttgcaacagtttttcgtcctgctgcacgccgtgtagcttgggtactaccgtgccgtcctttgcctgatagaaagagagcttgacatcggtaggtttgaggtagaagccgcccaccgtccccgaaacagtgtaagtgttgcgagacttgtagccacgcatcacccggtcgaagtccctcgtgtttttcagggtgtcggcggtgatgccgacttttttcaggttctcccagtcgatttttgccgggtcgaagcggtagccctgcttgaactcgtggaagtcgggcttcggaactcgaagcatttcagcccgcttgtcaccctccggtgtagggttgcggtggttgtcctcgattgcctttgcgtcccgctccgcttcggaagccttgacgctgaacagttccagcccggaagtgtcctgatacttgcggtagaagttggaaatgaagttgctgaacacatcgctgttcttgtccacctgcatgaactcgccgccgtgtccggtagtgggtggcacggtctgcaaattgccgtccttgtcgatacccttaacggcactcacctttccctgctgtttatccaagaccagcagcacgtctttttcctgcccctctgcgggcggggtcattctgtttgccataaataattggaattttagtggttacgggaatagtcccgcccaaaggtagcgactaaatatgctatatttggacgggcggcaaggactgtccaaatttgtcctgcgttgtctgaaattgtccgggtggagtaaatctccaactgacggttggagaattggaaacaggcataaaaaagagagcgaagttaatcactctcttggggtgagccatttatgagccatttaatcataaaccttatgccttataatcaacaacttattaaaatttacattatgcttgcgagccatttgtgaagcgtttgtgaagcgtttgtgaaacgtttatggaacgtttgctattttatcaatagactaataatgagctacatatcaaaattaatactgaaatacagcttatttttggaacgtttgtgaagcgtttggcaagcctttgattgagtttccgttattctcctattatcaggtgacacgacaaaaagaaaacatcttcggcaaaatctttgttatgtttttgcaggtgattacataatatactatctttgcagatagaaacaaaggacataaatatggcttcattcaggaaagagatacttgggcagattgaacggatagataccgggcgtatattcacgttccgggatttgtcgtttgaaatggaaaagactgccaatgttgcggtgctactttccgaacagagccgcaaaggggtactggtacgggttgaaaagggggcgtactaccgtcccaagaaatcagtgctggggctgggaaagctgcctgtctatcaggatgaacagttccgctacctgactgaaaaactgaacggctatatcacgggggcttacatctataacaaaatggggctgaccgaacaggttgccacaaccataacgatagccactcctaacccggttcgccgtttccgtttcaagaacttggatatagagtgcgtgaaagcctactgcatggactacccggatgaaagccttgtcccgtacttgcggctgctcgatgcgataaaggacatgaagcgcatacccggaacaaccgggcaggacatctacaaccgggtcaaaagccaatattttaacgggtacagcctgccggaactggaaaaaatcgtatctttggcgaaaagttacccgccacgtgtcagaaaggtggtggcggacatattgggcgacatcagacaaaccgtattgcaaacagaaatggcaaagaccattcttcccacgacacggttcaacttggattataaaacggcataggacagaaatatgaatttacattcggacaaggaagcgttcaaggaaatcatcgcactggcggctgaacatttcagctacgagcagtcgcacgtggaaaaggattactgggtatcgaagatactgcgggatatttccatgtccgaatatgcggataagacctacttcaaaggcggaacttcactttccaaagcctacgggctgatagaacgtttctcggaagatttggacttgttcgtgttcacgggtgataaaggtgcgtccaagcaggcggaaaagacattgaacaagaaactttccaaatacatagccgaactcaacagtgacatatacaaggaagatttgtcggaaacgggcggtaattaccgtaaactgtatttctcgtatgacaatgtatttcaaggcgtgggacttaaagagcatttggaagtagagataaaatcctgtgacctgccggacaaaaaactgatgttctacccggcggacaagcgggttatcaaaccgattgtgaccgcctttcttgaaagcatcgggcaagaggaactgataagcacctacgggctgggaagttttgaaacgcaatgtatcaacccccgaaagactatatgcgacaaggtttcaaggctggtaaagctgtcttacaatgaggatgcagccgcactgttggcaaagcatatccgtgacgtttacgacttgtcggcactctaccacaatcaggaatataacgattacctacattcggaagatttcttggatgccatgtaccgggtgacgatagaggacggactaaataaaaactcccgttcgcacttgtcgctggctgatgcaccgatattcaaggatgccgaagcggtcatggcgttgcccgaagtggctacggcgtacactaccgatttgaagaaactgactttcgacaaaagcaagatgccgccgataggcaaagctgtggaagcattgaagaacctgcacgaaatattagtgcgttttgaagcctaccgcaccaaaaagcaaaatgaagaacaaccgtaaagctacatcggctgttcttcactccatacattattatatacagctattcttcctccttaatcaagtggcatagctccgggtcgttcttaatccgggttatttcgtcctcgactatctgccggacttcctgccggatgcggtcatagttggcttgtatctcctcctgcatccggtcgttgccgtccttgtcggtgaagtcgataatctgcggcaacttcacgtaacgggcggtttcccgcttcaccttttcattatccaccacgatttcacagtggaaaatcttctgctctatccgttcatcgaagttgtccgccaccgcacccacgaacataccttgcgtgaggttggatattttactggcgggtatcaggctgtccatttgggtgcttatcgaggtggatttctcccgttggttgattgtcatgctctgccttttctgcaacacctttccgaagcgttctgaaaggatttttgccgtttcaccgactacctgaccgctgaacacgttacccaccgtattttgtatcacacggctttccttgtccccgtaatcacgggtaagctggctgtaatcttgaaagcccagcagaaccgcaaccttgttgcttcgggcggtggcaatcaaattatcaagcccacgaaaatatatagtcggtaattcatctattatcaccgaacttttaagctgacctttcttgtttatcagcttcactattctactgttatataatcccagtgccgccgaatagatgttctgacggtcgggattgttgccgacaaccaagattttaggctctttcgggttgttgatgtccagcgagaaatcatcacctgtcattacccagtaaagagcgggtgaaatcatccttgaaagcgggattttcgcacttgctatttgaccctgcaactgctcttgagcgtctgattcccaagcatccacgaacggggaaaggtagttttccagttcgggataactgcgcaaaatagtgaatacatcggcgtatttcttgttcaatagttcaatggcatgggggaacgtgcaatacctgccgccctgataaatgcgcaagtaccaaataatggctgccaaaagaataatcggactttccacgaagaaatcgccctgcttgcttatccaacttcgattgaggttaagcataatcgtgtagctggcttcgtaggcatccgcaatgtccgacatgaagctggcgtttatcgggttgcatcggtggctcttgcgtgggtcgtcaaaattgataatgtagaatttaggctttaccttatacccgtccaagtggttaagcaaatgattataagcgatttccgataaatcgggaaacttataatcatagcagtaaagcgcaaaacctttctcgatttgctgttttatgtagctgtttaccacggcatacgacttaccgctgcccggtgtccccaacacaaggctggcacggaacgggttcacgacatttatccagccattattccatttcttcttatagtagaaccgggtaggcagatttaccgaatactcgttctcgataagccttgtttcctgcatgaaactctcgttctctgtattaaagacatcatccattaggttgttcttcaacagccgggacatccatgtacccgccatgagcatacagatatagcccaccgacagcgtggcgatataaaacacggcatccgccgtgtgtggcagcggaagttccagcaaccaccagttcaggaaaaacaacacgacacccgccgcaaggctgcaatgtatcttcgcccacgttatcttttcctctttcacgcccttagtgccgatacacgacagggcgaggaacaccaccgaaaatagttttgtccaaagaacggacgagaacagcccggtggtgcgctggaagttccacagtatcttgtctatcacttcaaacgtcactccccactctttcagggtggagtaacagaaccagtacacgtttattcccacgaatagaatactgacagcccgcataaagtccatgacccttgcaagccctctcaaatcatcttcctgttgcatgattgtaatgttttttaagttagtcgatgcgccttgtgcgcttctttttcttctttctcttttggcgggcggtgtcctgcggctcgtcaccgactgatgcaccgccgcccagcaaaccgccgaaagcacccagcacggaagccacgcccgaaacgatgtcggcttccggcgtgaagcccggctgttcctgatgcgtggattgttcccgctgttgtgttttcacttctgactggtgtatatttccggtttcacccgaaaaacgttcgttgaacacgttcgccgaatactccttgcccaagcgtgaaccgttcagcaccacccggctgtcgtggtcgatgaacgtaacgccgtagatgcgcccgctgtcattctgacggaataccacgtcaatgccctgcttctttagctgttgttccagttccttgcggctgcgggcggtctgcatggcagtggctacaatcttccgggtgcgctctttcagtttcttgttcctgattgcttcgcccgatttctccattctgcgccgcaccgcttcataacccaccgacttgccgatgcgggaagcctttaccgggttgcctgtcttttcgcccttgtcgttcatggcggaatagacaatgccctgatagggcttgccgtttatctcgcctttgacttcctcggcgcacacgttgtaagcggcaagcaaagccttgtactccccgaacgactgaaaacgatagccatagcaagccgctttcacggtattgccgatttggtgcttcacgtccccggcggcatagtccacctttttaagttccgggcgttcggcacgctcctttcgctctgctgggtgcagcccgtatttcttttccagttcacgggtgatttgcttgctgcgccgatgctcgaacctgtcattcagcggcttgccgttctcgtccacccgcaaccccacgatgtggatgtggtggcggtcgatgtcggtatgcttgtacaccaaatagggctggtcgccatagcccaacttccgcatatactctttggcaatgtcggaaagctgctggtcggtcagcacgtcttccgggtgcgggtttatggaaatatgaagtatcggcttcttggtggatagctggacgggcatctgcatttcaaagctgcgcatacacccgccgatagagaaattcccgtcctcgcccaacagcattttgttggagaaaagcacctttgcttccccgctgtccaccttgttttggttgtacgccagtgcgccgaacatattgccgcccgtgcttattttggcaaccatagttccttgcacttgtttgtcaggtcgataacctgacggtttaacatagataattcagtggtcgctctctccagtttatagagaaaagccagtgcctttttctccgaaaagttgctgtgcaacgcctttacaacttggttgtaattgaccgccacggctctgaattgtgcataaaattcggtcagccgggcgcaatattctactgccgatttgtccactttcaccacccggaacggctcgccgaacaaccgggcggcgatgaaacgggacttgctcgtgacgcccgactgctcccactgcgagaggaagcgggcgttctcccggtcgttcaggtaaaggacatggcgatgcttcgccgggtctgcgagggcggggcgaccgcccttgttaggttttcttgtttccatgcttctttggattaaaaaaattacgacttcggagtgatttttacccccgcaaggggcaaggcgttttcaggcacggaaaacggttttgtagcatacaaaacacaccttgctattttctgacgaaaatcgaaatccgtcatggacggattggggttagcgtggaacggtaagccctgccattcaccagcccggttttacacctgctcccccctgcggttcgttactccgctgcaaagtaacggtgatttataatgctgtaaaataggcggttggtggacaaagcgggacagcgcaggacaaatcgggacaaggttttcaggggacgttttttctccttttttttgcatcggatttcaagattgaaagaaatattccaatcaggaaagaatgattgaaagcatgattgcaataaaacgtgattgcaggatttcaatatttcaagaaagaatgaaagcaggaaaacaagattgaaataaaacattctttcaatatttcaagattgcaacatggaaagaatgaatgattggaagcaataaataaatctatcaaccaataatgaacggaagcaatatggaaaacgagaaaacgcccctttatgtcgccttttccacccaaaagggcggggtcggcaaaaccacctttaccgtgctggcggcgagttacctctactacctcaaaggctacgatgtggcggtggtcgattgcgactacccgcaacattccattgccgggatgcgaaagcgggatgccgagcaggtcggggcggatgaagattacaagcgcatggcgtatgaacagttcacccggctgggaaagaaagcctacccggtattgtgcagttcacctgaaaaggcgattgcaacggctgacggatatatagccgccggacacgtgccggatatagtgtttttcgacctgcccggcacggtgaacagcgagggcgtgataaactcccttgcgggcatggactacattttcacccccatttcagccgacaaggtggtgctggaaagcagcctgtctttcgcaatggctatccaaaagctattggtgaggaatgaagcctgccgacttgccgggctgtatctcttttggaacatggtggacggacgggagaaaacagacctttacaccgcctatgacaagaccattaaggaactggaactgccgctgatgaaaacctttatccccgataccaaacgctacaaaaaggaactggtagcggataaaaaggcggtgttccgctccacgctctttcccgccagccgcccgctggtaaggggaagcaacttggaagaactgataaccgaaatagtgtactacatcaaattaaaatgatatggcaaaacaaagcggcgggatgccgaagatagacgaggatttcatgaaagagcttatatcgcagggtgttcccagtaaagaagataataaaccgaatgatgcaccacataccaatcttgcatcacaagttacccaagaggaacagcagacggaaacggtgcgggtggagaaaacgacaaaccgcaagcgcaagggcggttcgggcgactaccgggaaacctactttcagaaagtagaactggcagaccgacagcccttgtacgtgagccgtaccacgcacgaaaagctgatgcgtatcgtaacagtgataggcgggcgcaaggtgacggtaagcagctacgtggaaaacattctgctgcggcacttcgagcagtaccaagacgagataaacaccctgtacgaaagccacttccaaaagcctgtctgactatgataatctattgcatacttaccgggcttttggtgtactatatcgccctgtggctgtggtatcgctacacggacagccggacatcaccgggcagaacggatgatgcgccactcccacgaaacgaggtttcgggctacacgctgataggtgaaagccgatacaagggcggactaatcgggacagcgcaggacaaatcgggacacctccagcaagcggctgaaaatgatactatttttgcgccgcaggctgacggacagccggaagaaaacattccggaagcagcagccgaagcggaagaaacgcccggttacgagaatgacgaacccgactacgaggacgaggaaatagccgggtacatggacggtgacgatgataccgggcgggctacgggcgtgagctttgacgaactgggcgaagcggtacgcacggcgaacgccgacaaccccaccgaagcggagaaacggcaagccaccgggacactggcaagcattgaggggacgaacctctacgatgcggtggtggagaacatcaacggcgggctggcaaaggtggcggaactgctgggacgcaacgaagcggaactggctacggctgctgtccctgccggaactggcaatacaagcgaggaacacgaagcgttcgacatgaacgatttcctataatataataatgtataagcctgacagcatgaaacaacgggattacggttgattggcaacctgaaaaccaaacagacaaacgggactatccccgaccactaaaatttcaaattattcaccagccgggaaaggcggactatccacccgccgcccggcattaaaaacaaatcacaatgagaaagaaaatcttcttgtcggcggctatacttgccgccgtggtaagtgcctacgcacaaggaaacgggcaggcgggcatcaccgaagccacgaacctaatcaccgggtattttgaccccggaacaaaactggtgtacgcaatcggggcggtctgcggcttgattggcggggtaaaagtatataacaagttttcaagcggcgaccccgacacctcaaagaccgccgccagttggttcggggcgtgcatcttcctgattgtcgccgccactatcctgcgttcgttcttcctctaaaaaggcggctatgtctgacgagttgttgagggctaagcccgaaaaatatccggtaaacaggggtatcggaaagccggtggagttcaaggggctgaaaagccagtacctctttatcttttgcggcggcttgctcgccgtcttcgtggtgttcatcgtcctgttcatggcaggcgtgaaccagtggatatgtatcggtttcatcgtgtcagcttcgctgctgctcgtgtggcagacgttccggctcaacgcacggtacggcacgcacgggctgatgaaagccgccgcacgcaaacggcatccacgcttcattatcagccgaaaggcgataccccgattattcacctacaaaaaaagaaaggaagaaagactatgaggaatatgttaaaggctaccacgctggaaaggaaatttccccttttggcggtggagaacggctgcatcatatcaaaggatgcagacatcacggtggctttcagggtggaactgcccgaactgttcaccgtcaccagtgccgagtacgaaaccatacattcggcgtggtacaaggcggtcaaggtgctgcccgactactccatagtacacaagcaggacttcttcatcaaggagaactaccagcccgacaccgaaagggacgagcttagttttttaagccgatcctttgaacggcacttcaatgaacgcccgttcctgaaccattactgctacctgttcctgacaaagacgacaagggagagaagccgccgacagagcgacttctccaccctatgccggggcaggattgtaccgcaggagatagccgacaaggaagcggcggcaaagttcatcgaagcggtcgggcagtttgaaaggattatgaacgacagcggttttgtcacccttacccggctggcggcatcggaaatcaccgggcaggacggaaaggcgggcatcatcgagaaatacttctcgctatcgcagacagataccacctgcctgaaagacatcgggctgtacccggaagaaatgcgtgtcggggacgatatactgtgcctgcacacgctttcggacgtggaagatttgcccggaaaggtcgggacggactgccgatttgagaagctgtccacagacagaagcgattgcaggttaagttttgccgccccggtgggcgtgctgttgtcgtgtaaccacgtctataaccagttcatcttcatagacgaccacgccgaaaacctgaagaacttcgagcagaccgcccggaacatgcaatcgctctcccgttactcccgtgccaaccaagtgaacaaggaatggatagacgagtacctgaacgaagcgcacagcaaggggcttatttcggtacgctgccactgcaacgtcatggcatggagtgacgatagggacgaactcaaacgcatacgcaacgatgtgggaagccagcttgccttaatggagtgcaagccacgccacaacacggtcgatacgcccacgctcttttgggcgggcatacccggcaacgaagccgacttcccggcagaggaaagtttctacacgttcttggggcaggctctatgcctgttcgtggaagaaacgaactacaagagttcgctttcgccgttcggcatcaaaatggtggacagggtaagcgggcgaccgctgcacatcgacatttcagacctgcccatgaagaaaggcatcacgaccaatcgcaacaagttcatacttgggccgagcgggtcgggtaagtctttcttcaccaaccacatggtgcgccagtattacgagcagggggcgcacgtgctgctggtcgatacgggtaacagctacttggggctgtcccagcttatccacaaccgtacacacggagaggacgggatttatttcacctacaccaacgagaacccgatagccttcaacccgttctatgtcgaggacggggtatttgacatcgagaagaaagagagcatcaagaccctgatactcaccctgtggaagcgggacgatgaagccccgaaacggtcggaagaagtggcgttgtcaaacgccgtgagtgcctatatcgaactgataggcaaagaccgttcggtaacgccctgcttcaacacgttctacgagtttgtcagggatgattaccgccgacagcttgaacagaaaaacgtcagggaaaaggattttgacattgacaatttcctgaacgtgcttgaaccgtactatcgtggcggtgagtacgactacctgctgaactccgacaaggaactggatttgctgcataaacgcttcattgtctttgagttggataacatcaaagaccacaagattttattcccggtaacgactatcatcatcatggaagcctttataaacaagatgcgcaagttaaagggaataaggaagttaatactaatcgaggaagcgtggaaagcgattgcatcggcgaacatggcggattatattcgctacctctgtgcgcccgtacaagctgcttagtaaatatcccactggcaagggattaggtaagtgttctttgaaaaacctatcatcacccgacttatccgaaagggaaaccggacggggagtgtagcatgtcgggaacgtcgtaagtcagtcagttaccagactgccactgaacggcaagatgaaacgatggatatgaggatgaaaaccgaattgtttgaacgacagtccgagctgctctacttgaaggctatgacgtaaggtaactgaaatcgtcatactgcggtactgctccggtgtataggtacggacgcaagcaagaacttgccgcagagcaaccatgataaatggtaaaggacggaaatcgcatccgacaatccatcatgccaacagttactaagtaagtaaacggggattacctaaaccggaacgccgtaaggctatgaggtgcagacctctgaatatccggcacggtaacggagcctccgtagtagtccgggcagggtaacgccctgcacatggcgaagggaggcagctaattttctttaatacaatttaatggataatgtgagagacattatgagaagtccggaaagagtattaaacagtctgaacgaacacagtaaggattcgagctacaagttcgaacgcctttaccggattctgttcaacgaagagttgttctatgttgcctaccaaaagatcgcatcgaacggaggcagtacgaccaaaggctccgacggtcgcagtatcgacgagatgagccttgcccggatcgaaacgctgatagcctcgttgaaagacgaaagttatcagcctcacccgtcgcggagggtgcatatcccgaagaaaaacgggaaaacgcgccctctgggaataccggcttttgaagacaagctggtgcaggaggtagtccgcatgattctggaagccatttacgagggacattttgagaccacctcgcacggtttccgacctaaacggagctgtcacactgcattacttcatattcaaaagacgttcagcggggcgaaatggtttatcgagggcgacatcaaagggttcttcgacaacattgaccatgatgtacttgtcggaatcctgcgggagcgcatttcagatgaccgttttatccgtctgatacggaaattcctgaaagcgggatacgtcgaggattggacgtttcacaacacttacagcggaatgccgcagggaggtatcgtcagcccgattctggcgaatatatacctcgataaattagacaagtacgtgaaagagtatatccgacatttcgacatgggaaccaaacgcaggccgggcaaagagagcaacgatttggccaatgaacgaaaacggactgtgcggaaactgaaaaagataaaagacgggactgagaaggcggctttggtcgcaagactcaaagccatcgaacaggaacgtgcagcatttccaagcggagatgaaatggacggaagttaccgcaggctcaaatacatccgttacgccgacgattttattctgggtgtaatcggtagcaaagaggatgcactgcggataaaggaggatattaaatcattcctatccgaaagcctcgccctcgaactgtccgaagaaaagacgctgataacccatacgggtaaatcggcgaaatttctcggatatgagattacggtaacacggaacaatcatcaacgacgggatgtgcaaggacgtctgcgacgcacctacggcaagcgtgtccggctgaatgtcagcatggcaacgctgcgggacaaacttctggaatacggagctatggaaatcaagctccgcaacgggaaagagatttggaaacccaaatgccgttcaggattgatattcaacgacgatcttgaaatcctcgaccgatacaatcgggaaacagtgggattttgcaactattacctgatcgccaacaactgcgtcgtactgcacaacttcagatatatcatggagtacagcatgtataaaacatttgcgggcaaatataggagcacggtacgaaaaatcaacaaaaagtaccgtctcaacaaactgttcaccgtaaagtacgagcagaaaggggtaatcaagtcccgaaccttttacaagacaagtttcaaacgccggacaacggcgttcaacggaagctgcgacatcgaaccgtactctattgcagacgtgagccgaaccaatttgacggacaggctcaaagcggaaaaatgcgaattgtgtggggcaacgggcaagctgattatgcaccatgtccgcaacctcaaagacctgaaagggaaagagagttggaaacggctcatgtcagcccgaaaacgcaagaccattgcgttgtgtccgagttgccacaggctgcggcatctgggaaaagtttagactgaaaaaaaattagtggagagccggatacgccgagaggtgtaagtccggttcgggggcgagttcttggaaacctgccgtagaaatacggtaaggcgccgggtgcttagcctacacaaaacagtccggaagtatttcggggaagcgattgtggtcacacaagagattgaggatattatttcttcccctatcgtgaaagagagtatcatcaacaactcggactgcaaaatattgttagaccaaaggaaatatctcaacaagttcgacagcatacaaaacctgctggggctgaccgataaggagcgttcgcagatattgtctatcaacatggcgaaccaccccggacggaagtacaaggaagttttcttctcgctgggcggcacacaatcggcggtgtacgctaccgaagtttcattggaagaatattacacgttcacgacagaggaaagcgagaaaatggaactgttcgccctcgccgacaagctgggcggcaaccttgaactggctatcaagcggcttgcggaaagcaaacgcaatccccaatcatcaacaacttaaaaattaggaacatgaagaaaacaattctccttttggcggtatgcctttgcttcatcggcaaggcatccgcacagtgggtggtgtcagaccccggcaacttggcacagggcatcatcaacaccaccaagcagatagtgcagacttccaccactgccaagaacacgctggacggcttcatggaagcgcagaagattttccagcagggtaaaaaatattacgatgcgctcaaagcggtacacgatgttgtcaagggcggcatcaaggtgaagaagtccattgagctggtggcggaaatatccgaaatctacgtgcgaaactatcagaacatgctggcagacccgaactacacgccggatgaactcaccgccatttcagccgggtacgccaagctgctctccgaaagtgcggacgtgttgcaggacttgaagaatgtagtgaacgtgacgggcatgtcgctgacggatgccgaaaggctggcggtaatcaacaacgcctataaaagcctgctcaactaccgcaacctcgtgaactactacacccgaaagaacatatccgtgtcctacctgcgggcgaagaagaagaacgacaccgaccgggtgctggctctctacggctcggcggatgaacgctactggtaacgtataaatatggtatgcctatgttattagcagcggtggattttgacaacctgcaccaagtgttgcgggtgctgtacgatgaaatgatgcccttgtgcagtaacatgacaggggtagccaaagggatagccgggctgggagctttgttctatgtagccgccaaagtgtggcagtcgctcgcacgtgccgaacccatagacgtgtacccgctcctgcgtccctttgcgttggggctgtgcatcatgttttttccaactttcgtgctggggactatcaacacggtattgtcgccagtggtaaaagggtgcaaccagcttatggaaacgcagactttcgacatgaacgagtaccgggcgcagaaagaccgactggaatatgaagccctgatgcgaagccccgaaacggcttaccttgcatcggacgaggaatttgaccgacaactggaagaactgggctggtcaccctccgacatggtgactatgacgggtatgtacatggacaggacggcttataatataaagaagtccgtccgggactggttcagggagttattggaaatgctctttcaggcggcggggctgattatagacacgctgcgcacgttcttcctaatcgtgttaagcatactgggtccgctggcgtttgcgatttccgtctatgacggtttccaaagcacgctgacccggtggatttcacgctatatctccatttacctgtggctgcccgtgtcggacttgttcagcagcgtgctggcacgcatacaaaccctgatgctccaaaaagacatcgagcagctttcagacccgaatttcatcccggacgggagcagcaccgtgtatataatctttatgattatcggcatcgtgggctacttcaccattccaacggtggcaagctggatagtgtcggctggcggtacgtctgcctataaccgcaacgtggcacgggccggttcaatcgccggggctgcggtcggtgcggcaagcgggaaagtaaccgggaaactactcaaataaccaacatcaaaatttagtatatggaatttaagtcattaacgaacatcgaaacgagtttccggcaaatccggctctttgcgctggtattcatctgcctgtgcgcactggtgacgggctttgccgtgtggaactcgtacagcttcgccgagaagcagcggcagaagatatacgtcctcgacaacggcaaaagcctgatgctggcactctcgcaggacatggcacaaaacagacccgtggaagcgaagtcgcacgtgcggcgtttccacgaacttttcttcaccttatcacccgaaaagggggctatcgaaagcaacatcaaacgttcgttgtttctcgccgacaagaccgctttcaactattacaaggacttggcggaaaagggctactacaaccgggtgatttccggaaacgtcacgcagacggtggagattgacagcgtgaagtgcgacttcgaccagtacccctacaaggtgaacacgtatgcccgccagttgattgtccgggaaagcagcctgacggtgcgaagccttgtgacctcgtgccggttgcttaacgccacacggagcgacaacaacccgcacggcttcatcatcgaagcgttcaccattaccgagaacaaggatttgcagaccattaaaagatagccttatggagagaaaacgaaattacatcgaaaaggtgcaggactgggcggacgaccgcctgcgccggatgtgcggacggattacgccgggcaaaaggctggcggttatcctcgtgatgttcttctttttcggcggcttgtctatctacatcaccgtttcatcaatatacaatatcgggaaacgggacgggcaaaggctgcaaatagaacacatcaggcaactgccgttgcacggcaatgacacaaccaaaaatatcaacccgttaaacagaccgcaatatggaagaagtacagaagaatgagaacggcacgaccgtaccgcaggcggacgggaagccgaaaaaggaagacaagcccaaacgggaacttaccccgcagcaggtgcagcagcgcaggaaaatgatagtcttcccgctgatgttccttgcctttgcagggtgcatgtacctgatattcgcaccctccggcaaagaggacgtgaatgtggaaagcgtgggcggcttcaatgccgacatacccctgcccgcagaggacgggattatagccgacaagcaaaaggcttacgagcaggcggtgataagccgcaaacagcaggacaagatacaatccttgcaggacttcggtttcacgctggacgatgatacggaagaaccacaagaggaaatcaatctgatgccggaagaagatccgaagccacaaaggggcggcggtacttcttcacgggcggcttaccgggacatcaaccgccagttaagcacgttctacgaaacgccccctgtggacgaggaaaaagaggaattgaaacggcaggtggcggaactgaccgactgactgaaacaacagcagaacgccacgcctacggctgacgaccaaatggctctcttggaaaagtcctacgagctggcggcaaggtacatgaacggcgggcagggacaagtcgcacaagtcccggtaacgggcggcattgaacgcaagccggatgcggtggcggtgcaggctatccgggaaacgaccgtttcgggattgcagcagcccatgagcgatgccgacttcatccgggcttacagccagccacgaaactacggcttcaacacggcggtaggcacgggctacgctatgggaaagaacacggtagccgcctgcatccaccaagaccaaacgctggtggacgggcaggcggtgaaactacggctgctcgaacccatgcaggcgggaaatatcgttgtaccgaagaataccctcgtggcggggacggcaaaggtgcagggcgaacggctcgacatactggtgtcctcgattgagtacgctggcaacatcatcccggtggaactcgccgtgttcgacacggacgggcaaaaggggctttccgtaccgtcctctatggagcaggaagcgttcaacgaagctatggcgaatatcggaagcgggctgggtacaagcatttcctttgcccaaagtgccgggcagcaggtggctatggacgtgacaaggggattgctgcaaggaacgtccggctacctcgccaagaagttccgaaccgtgaaagtgaagctgaaagccgggtacaaggtgatgctttacgccaaacagcaataattactcaacaaatattcatccactaaaattttaattgacaatgaaacagatttttgtattgctcgccctcttactgggcgtgtgtgcggcaaacgcacaaactactgacaccgtgaagtatgcggctggcaacgacttgtaccggggcattacccggaaactgccttaccgacaaatggtaacgccctacggcgtggaagtgacctttgccaagacggtgcatatcatcttccccgccgccgtccgctacgtggatttgggaagcaaccacatcatagcgggtaaggcggacggtgcggagaacgtaatccgggtgaaagccacgacagagggctttccgggcgaaacgaacttctccgttatctgcgaggacggcagtttcttttcattcaatgccaagtacgcccgtgaaccggaaatgctcaatatcgaaatgaaagacttcttggaaaatgaagatacgtccgatttctcgcatactcgcatgaacatctatttccgggaactgggtaatgaaagcccgctactggtgaagctgataatgcagagcatctacaagaacaatgaccggaaagtgcgccacttgggtagcaagcgtttcggcatacagttcttaatcaaggggatttacacctataacgggatgctctatgtacacacgcagacgaagaacagttccaacgtgcctttcgataccgatttcatcaagtttaagatagtcgataagaaagtgcccaaacgcacggctattcaggaaacggtgctggatgcggtacgcagttacaacgaggtagtagagattgccgggaaaagcaccgtccgcacggtgtacgccctgccgaagttcaccattcctgacgacaaactgctgttggtggaactctacgagaaaaacggcgggcggcatcagaccatacgggtggagaacgccgacatcgtgaacgcggaagtgattaacgaactcaaaatcaaataggaatgaagaaacacatctttataatgatgctttttgcgctgtgcctgacctcgtttcaggcacacgcacaaagatacctgccgggcatgaaaggcttgcaggtcacggcgggcatgacggacggggtgcattggaacgccaatgcggattttgcctaccacatcggggcggcgtacagcgtttacaccaagaacgccaaccgctgggtgattggcggggaatacctgcacaagaagtatgactacaaggatatgagaataccagtcgaacagttcaccgcagagggcggctattacctgaaattcctatcggacagacgaaagacctttttcctttcattgggcttgtcggctctcgccgggtacgaaacaagcaaccgaagcgaaaagctgctgccggacggctctaccttgctggataaggactgcttcatttacggcggtgcgctgacgctggaactggaaacctacctgaccgaccgggtggctctgctgttgaacgcaagggaacgggcgttgttcggctcggacatcggcaagttccacacgcaggtatctttgggactgaaattcattatcaactgaccgctatataataatgtatatgaagaatgtaatgtataaaatcatcatgggctgctacatcgtggccgccctcgtgcttgtcaccgcctgtaatgacaacttggatattcagcaggcgtacccgttcagcatcgaaacactgccagtacccaaaaggctgaaagtcggggaaaccgccgaaatacgctgccgactggtgcgtggcggctattaccagccgactacctatcagataaggtatttccagccggacggcaaagggaagctggaaatggataacggcacggtgttcctgcccaatgacctttacccgctggagaaagaaacgttcaggctctactacacctcggcatcgaccgaccagcagacgattgacatttatatcatcgacagcttcgggcagatgcagcaacttacactatcatttaataatgacaacagcgaagaaggaacggaaacaataaccccctaataataaaacgacatggtaaaaatagaattggatatagaaggtatctcgtggtacatagaaaccacgttggaaacagatacagttccggcagtaggtgacatcatcattgtggacaaggactgtatttccgaacgtgacagtgctgaattatggaaaacgccgtccaatcaggttttcaaatgggcggacgaagaagatgatgcgcccgtaatggtatggttcgattgcgacacggaaatgcttgtcaataaacggacatggaaatatgacaccgaggaagaagaaaccgtgtgcatacttggtgtaaaatttattcactatgaggatttatagttgcgacatccgtttttatcatcctcttgggaaaccgggtatggaatgatacgcaaagcgtaaatatcgggcagacagcccgccgggaagcatcggcgggctgtttccatgatagggaaaacgaaaggcttctttgttactttcttcacccgctggcaggctcacggaagaaagtaacggcggcaagcagccgccgtcctctatcaactggttttaaggctctttatggacgtgtatttctctaaccacacctttacctgctccatgttatattcgcccgtgatgattgccgtatggtcgtctatggctacaaaccggacactttcatagctgtttacccagccttgcagggaacagacgccccacgtttccacatctgcaaaaacactgcggtctatccggctgattggctcgccgaaaactaccgtcattatctgaaagtccggtttgtcctccaacagttgcaaatggtgcagcgtgccgaactcgtctattttgcgcccccacgcccacacatcattatacaaatcatcgccccactggtgcgggtggtcgaaacggacttttacctctatggtgtgttcgttttcttctgtgtcctcgataacacccgttaccattaagcccgtaaaaatacactcgcaacgcctgccgataagctccttgtttacttctgtcgttttcatgtccctgaaatttacttgtttattactccgttcttcttcgctacccattcgtcacgcctgcggcggcactcgtccagcgttttggctaccgtgctgaaaagttcgccgtccgtgtggcggtagtcatattgataataaatttgtcccctgaaagcccccaaacggcatttcacgaacttttcttctcccggtgttcgggtgatgcttaccccgtttttgttaagtgactgcatgatgtcttatttttttatggttataaacttggttgttttaagcgggcagggctttgacaccccgcccggattggttgttatgccgcacggaacacaaagccgtcatcaaaccagtaatcgcacatgaacaggtcacgggcaaactgtttgtaatcgaaataggtctttgcgaactccggcaggtcgtaacattcctctacaatttcataggcgaaatcttcttcatcgtcatattccccttgatattcatcccggaaatcccgtacaaggtcgtccgcatcttcctcgcccaaatcatggcttttatagttgcaccacacgaaaaaggcttcctgctcggtgtcgctcaaatcctccaccgcatcacgcagggcaaagaagttttcagaaatccagctttcgccgattaagccctccggcacgttctcccagtcctgaaacatgtattccgcatcttcctcgtccttgtgcagctcccggcaggcttcataaaattcttccttgtccgaatagtccgaaaggtcgagccatgcgccggacaatgaaccgttgttgtacttggcataagtgcctacataaacttttgcttccgataatacctttgcttccatattgctgtaattttttaagtttttaattttatgcggatttgagaggtgagggagttgaagtttcactgaacttttttcctgtttcccgtaaatccgactttttttttatgcgtcttccggtcgggtcggtcgttttcgtttcacataggcttgggaagggtagtgtttagagtttgcaaggtttggggcaaaaaatacctcgcaaggcagggaagattttttcgccaaaccggaacggctcgaccttgcaaaatcgtgaagaacacgtaactacctttgcctattgaaatgattaaaacgactgtcccggctgggggactgcgtaagaggaagatttacagatagggaaaccggggaaaagtgcctgttctctttcatcttttagggaacactccatgcgggcgggaaaggcaagggtgttgtgagcttgcttgcaatacgcttgtgcgggtttccaacggctcttttcacgaaatacagtcagccatgccacgcacggctggcgtttcggggaatgtgccagttggaaaaggatataaaaaatgcgggtagtcggtggactgcccgcaaggtggaagaatgtactttattgggatatagtttgttaggcggaatttcgttaccgaaatcgttacctattcgtttttgtcacggttataggtaacgaaacctaccggacggcgttctttctgttgtttcgactggcttagaagctgggtaagggcttggtacagttcgttgaactgcgcatcggtgcttacctccagttcctcgatgcgccttgacagttcctcgtaaccgattgccatttggcgcatgaggacaaaagcccgcatgattgaaatatttacttctatggctactttggagcggagaaccgaagaaagcatggctacgccctgctcggtgaaagccataggcatagcaacgccgaagttgtaagcagggggtatcacattttgtgatacccctatggataacagcaagttagcttcctcttgggtgagtacaaacataaaatcacccggaaaacgctcgatattgcgcttgaccgcctgcttcaaggctcgtgtttccacttggtagagttctgccaaatgataatcgagcatcacccggcaacctctgacctcaaaaatcttgttttggataatctgcaaatccataatcgtatattttaggagatttagcaatgttggaataatagtaaggactggtcacaaattgtgaccagttcccaataatcaagattacatggcgacttccttgtaaatcttctcgatgccgacaaacttcttgtcaagcccctgcatatcgctgcctatcttgctgttggtgatgcgggcgtaaatttgcgtggtttctatgtttgtgtgtcccagcatcttggacaccgtttcaatgggtacgccctttgacagcgtggtggtcgtggcgaacgtgtgccgggcaaggtggaatgtcaggttctttttaataccgcatatatcggcaatctctttcaagtaggcgtttagcttctgattgctgattacgggaagtatcttgccgtccggcaacttgcccttgtacttcttcaaaatcatcttgggaatatccagcaggggaacattcacgtccgtattcgtcttttgccgcttggtgattatccaaaggttaccgtcaaaggacttttggatattctcctgccgcaagttggcgacatcgctgtaagccaaaccgcagaaacaggaaaagacgaacaagtctctgacgtgttccagccgttcggaaaccattttctttttaaggatgatttttatctcgtcctccgtcaagtagcccctatccactttttccagcctgattttgtagctggcgaacgggtcacccaccagtatgccgttgttgcgggcaatgatgatgatgcgcttgaagaactgcatgaacttggcggtggtgttgtaaccgcacttgcaggcggtacgcaaatacaactcaaaatcggtaatgaacattgggcttatctcctttatggatatgtccgatacgttgtacttgctttggataaattcagcgaggtggcggcgggtcacttcatacttgcggtaggtcgctatcgtcttggatatgcccacaagctgcttcacatcgtcattgtgcttttggaacaatgaaaggattgtttcgtggctctcgctgtgtcccaagaactcgttcttcactttctcggcggtcacgtagttgtcacgccgctgcatttcgtggtaaatggtgttcagggaagaacgtatgtcgtccagcagggcgtttattcttccggcatccctgcctttggctttgcctgcggcaatgctccagttgtcgggctggatgctctgtttcgtactgaactggcaaagtttgccgtctatggtgatgcgtgccataatcataacctcgccgtttttcttttcagaacctttcttcaaataaaaaagaaccttgaatgtcgatttcataactcactttttttagttgcaaaattactttttacctctcgtttttgagttatgcagactatggactaatcaagtcattatcaggtcatttatggacaaatcgttaccgtttttgtccggcagggaataggtaacgatttagtaacgaaactttgtcttttaccgtacttttgaagtcttggaagcaggactttcgggcaataaaaaaagccacaaatcattgatttgtagctttttgtccgtttgctgaccatttctgtccagcacgttcagcggagagagagggattcgaacccccggtacagtaatcccgtacgtcagtttagcaaaccggagaactgaaaaattttatacaaataattcttgcgattttttgtgtctgttctcgtgcttgtatcttacactgcaaaagtaagttataaatttatattatgcaaataatatgatagggaaaattatgtatctatgtagaaaatatcgggatgaaattatttttggaaaactattagaaaaccttttggatatgaaaaaaccaccgaaaaaatcggtggttttcattttgcggagaggacgagattcgaactcgtggtgcgagttacctcgcacgccggtttagcaaaccggtggtataagccactcacccacctctccgggcctgcttataccccataatcgggaagcgggaacaaaagtaaggcaaaaatgccaaaataccaaatattgcgggcaagaatttttttagatgagtagaatcggagtgatctcaaaaataaataaaaaccaagagggtgtagcaaacagttctaaccaatgacagtaccgcctttcggggttccagtttttaccaatgacagatggctcagcatccagtcttaaccgatacatttgcgctccctcttggagacctattttgtgatgcgacttcttctttcagggcttttcatcaaatagtaaactttgttgagaccgtatttacggacgattatcactcgttgaggcagaattggtcctaataatgttcgttgtaaatgcggcggctcggtctcggaccgacaaaaacacaatccgaggtttaccgaggcgtaaaaatcgcttgccgtagttcgagacatatccaatgatactctgcgacgaatggtacttattttaaggaaaccgtctttaacttgtgtcccttgtagcgtgtcgatcggaagaaccgtatatatttttggtgtctgatattgtatttgatacatataaataaaacgtctggcaatcgtttccagatcatacggaaacttgatccattctccgtgatattccgaaattaagtcggcgacagccactggtactgtgtcgttccatgtccaacgtgggtggtcattgaatttttcggtaaatacggttttctgcggataccgttcttgtgaagaaagtttataggacgggtttcccacgatatgccaacctatttgtttttttgtgggcttttgcatgattattttatgtgaacgggaattacaccttgccagcccgatatataagttgggtaagattcgattgaaatgttcgagactgcatagcggacggaaataaatgtcgccgttcattattgccgctgtctcgttcgtaaaatgtgtgcttttatcctgtcgtttgtaacttattttcacgattagtccgggcaatattccgttatcgggcgattctcccgataccgttgatgccgggacatagagcttgtgcgtagcagggtctttctttacctcaacggtatattccacggttttgcttgcggcctttatgcctccgagtacggtttccgatgctgcgggcagcgaatatggggccggaatatcgggtttgttattgaggtcattgtagtcgttgctggttgctacggctccgagttttggaatttggggatagtctggcacgtataatttgtgtgtgttggggtctatgcgtacttcgacgctgtatccgtcggttttcccctcggcttttatcccgcccagctctgtggccgatgccggaagaatctctttcgagcaatattccagactgttccacctcgttacgccgtcgccgaatttcatacgccgtgtatcgagttctatgccgagttctccttcccgtaatatgggattgacttctgcccagcgagccgctgtcgcccgcctgtgttgaaatcgggtgtgtatggttatcagttcattcatcatgcgtttcctccatccattacaaaggtgtttgcggtgtcttgcaagtaattggttactcgctcattcgtatagtaaagattttttttgccctcgttcacattgtcggtcgtaagtgtttgctgagggatcagtgcctcgttgagctttccgccctccccgattacgggtatttgtcctgcttcggtgcccgtgttgcacgcggccgccgttcctgcgtctttaattttagataaagacagctcagggatgtcctgttcttcgagtggtttcaacgatgtttcgatagatatgtccttactaccgtcgaaggtcgtgtttcccgtgatggctcctgccaatgtaacagctcgggccgttttgagcttgtcggctgagagtgccttatcgacatatccggtcttggcaccggcttcgctttcctttgcaaaatcctttgccagcatcgccccttttgctgcgagagcctcggccgtgatgagttggagccactcgcggttgtcgctctcccgttggatcaatatgtagatttcgggagaggacgcagaaaggtcgatccaaaatgtcccctcctcgtaggtatgttggcttccatccgaaggcgccgtgctctgaatgataacggattgtccgccgaatttggggaggtcgttccatttcgtcgagccatcgccgaatttgaggtagagtttgtctgtactatatccggcttcgcctttcagcagcacgggattcgccgatacccaattcgcttcggtatcgttgcggacgatgattttgctttttaccgttatcgtggccatgtagtttagaattgtgcgtttccgccgtcgattattttgatgtcgttgtagtcggggccgaccgtgcgatagttttgtgccggcgcgtcccagcgataaaaccggttcgttgattcatccagatagagcatgtcgttattcccctgtttcgggaaggtagccagcgatgcgtaactgcggaatgcgacggccggtactccggtatttcggcctccgatccaccaatttccatccttgccgatttccggcgtcaatccgtctgttccatcttcaccgtctttcccgtcgatgcctatgcggtttgcgaagtcgaaataaagtcggtgagaaagagccgagccgtcggttacggacaaatcgccttgttgcaatatgcagagtagtttcatagccttgctttgacaagcggaaccgtgcgccgttcggctttcattaccgtatcggtctgcgtatcatgtaattcgacggtaaggacaatttcgccttcctccatttcctcggtcgccgaggccggaatatttacgaagtagcgagcgctgtcgcgtcgctcgattttcagttcgtattccgcagcggttccggcaatcgctttcgggccgtgtttggatgtcgataacaacagtacgatgcggtaacggtcgaggttgtcgagccacgcagagggaatcgtttcgggcaattcctctggtaattccacgtcgtccctcaacgcggtaatcagcagggcgaagctcgttcctgcaataatcgtatgggcacggcaactctccataactataatcttcgtcgcacgatgattccgataatcactccggccagcagtccccatgcgatttttcccgacatgttccagaaccgctgccaccatgtgaggggcatcggtacgggtacttcgatccgctcttgttcctgccggacgatcgtactcgtcgccgttgtgtccgtaatctcgacggggacgatttcggacttctcttgcggcttattccgtaagtcgtgatataattttccgtcgggacgtatgaaggcatcggaggcggcatatttcgtttcgaggtgcgatgtatcggatggctcggctattacgctcgtttgctgatcgggaatatgtacgatgaccggaacatattttatttgcgttcgaatccggattttctcgtctatccgcacgctatcggtctggcggctttgcaccaataccctgctgggtgaacaacttaccatgcagagcgaggctatgagtaaggcgcgtttcatgatgtatcagagttttccgtaatatttgacgaacgcgaaccaacggcgcgaggacaggtaatcggcctcggcttcgtgcgcgtatgcctccatctcaaaggcggaagcgtggtaggctgcgtcgttccatcggtcgcgtgcatcgcctcggagaatgtgatagacgtaagaaatcagccattcgaccccatacaacaggtagaaggtcgtcggcacgaacaacagccaccatgcggatacatggccgcccagcaacgcggatcctacatggagaagaaaccacaatacgacgctggcggcgagacattcccaatattgccgcacatgaatcccctcatgccgtttcactttttcagacaatgcggtgtactcggtcagcacgacgccgaagaacatgcaggttttgaacgagccgaacaacaggctctttgcgagtttggaatcgtaatagattttcatagtgacaggttatttgtttcggtgatattcgatacagcgaagcagcgccgaaacgtgcatatcggctacatgtttgcggccctcctccgagagaattagccggcaatcggcctccgtgtccataaagaaattctcggtgataatggccgggcaggtcgtatgtcggagcagataaaaatgcgcctctttgtccgggtcgccgtccgtcgtgtccatacgcatcctctgttcgggaaatgcacgggcggcttcttcgtaaaagatcgtcgcatagttatccgcttccgtttctccgacggatgtccacgcttcccatcccgtgccgcctccggcgttggcatgaatcgagacgagcagacaattttccgggccgacctgtgcggcgatctcgttcacacggcgggtgcgttccgccagcggaatatcgtcgatttcgggaacgaccggcacgctgtcggccccgcgtgcggtcagcgcctcatgcactcgtcgggcgatgtccctgttaaattcgtattcgaagagttgtttcccgtcgggccatacgggagagcgttttccggccgtggcgcggccatgcccgttgtcgatcaagattttcatttcgtatcgttatttttaggttgttgccggctggcgttatttttcacctcattgtattggagcaatagttcggttatctttttagggtctttggctttggccaacaactctacgatagttgtcatctccaccgccgaggattttatcgctttgagattttcgcggacggaacgatactcggtatagacgacacccacggccgccacgccggaggcatacggaagcgaatagatgccgaacagaatagccagcaggtcgaataacatgagcattcccgttactttcccgtagtcgccgaatttcgagaacgaacgtctgaaaccatgactgtctctgggtattttcaatacttttgctttacggatgccggtcgtaaagtcgattatcacggcgccgatcatcgcacaccaaacgactgcttcgagcaggagtgcccgatgaaatgcacggctttctataccggtcagatcgacgatgtatcgcaaaatttcgtgattttccatttgatgtggttttatgaaaataaattgccttgtttcagccgtttccggcaaatgtcgatgtagtcgggattcagctcgaatccgatgtattttcttcctaatcgtcgtgctacgacggccgtcgtgccgctacccatgaaagggtcgaggacgattccgctttcgggacatccggctttaattggaatttcgaccaatcgcattggatacatggcataatgcgcctctttactcggttcatacgggatgcgccatacacaccgcatattccgtccgtgaggatttatgtcgattttccctttgggccgtccgctgattctccggtattctattccttttccactcagattatggggcctctgataacggatgaacgttgcaggggcataaggttcgaattgctgttgaaagtaataacggcagtttttggtaaagaaaaatatcttttcaaaatctaccgtaaagcggtcgtggacgcttgacggtatgcaggccggtttatgccaaatgatttcattgcgcagaatccactcgcggaagatcatttcatcggcaaacttattcggaatattgcacaatgatttacggaggatacgaaggcgtgccgtatcgacctgttgattatttaggcatgaattgttttttgaatgttcgtgccattcgatcttttgcggtcggttgtatttaggcggattgctgtatgtgtctcccaaatttacccacaatgaaccggaggatttcaatactcgacggcactcgtcgaagatatggcacaaatgcgctatgtaactatcgcgtgtaggttccaaacccaactgtccgaaccaaccgtccggccactcgattccgccgatgccgtagtcccgcatctgccaatagggaggcgacgtaacgatgcagtccaccgattcattgggaagcaatttcagtccgttcaaagcgtccgtattgtggataatatttagttgcatatattattgtagttgagcatttatatagtttcggatcgtatgcagtactcgataagctacctgcgggacgatagcattgccgtagcatttaatagcttctatgcgccatctgggaacggggtttcggtgtcggtcaatgacggattttgcaaaaacggcagcaggatccaacaagtcggaaagcccatcatttcttccacaaacaggggattgagccgggaagtttttccagtccggtatgcaattgtgtcgttgagctgttgagtatgaaccgtccctactcggttggccattccgctccggaaatcgtttgcctttggtgtcggaagcatcccccgcataagagttccgacaagactgcccctgtcgatttgcgaaggtggaatcgacgaattgacagcatcgttcgctgttggggttggtaaaagtccgcttactgccagatcgttcaatagggacatatatgttagacccgattttttcctcttgtatagtccggttactttttgacctccgcgtgatgcgtccgaggcatggggagtcggaagcaagtctgtttgcatgaacttcgttcgaccgttctcgcaatgcttcaagccttgtgtctgtacggtgggcaataaaccatattcggtctctgcggtggggagcaccgacaccgcaagccggaataatgaacggttgtatttcgtagccgttcgtttccaagtcagagcacaccgtgtcgaataccaatcctttcgaccaattaacaattccgagaacgttctctgccacgatccagcggggtcgaacaattcgaataatgtcgagcattgcgggccatagatagcggtcgtcttctgtccctttgcgttttcctgcgagcgagaacggctgacaggggaatccaccggtaaggacgtcgatgcgatctgtccacttactgaaatccgctttttgaatgtcttcatattgctccgcatttgggaaatgatactttaatacacgacggcagaacgggtcgatttcgcagttgaaggcatttaccattcctgcccattctgcggctaaatcaaaccctcctatgccgctgaataatgaaccatgtataagtcgtttttccattggtcaaaccaaacctgcgtcaatgatttgtatttctccgtgctgcgaatattcttcggggcacggagatacccgatgggcgcgtcgtaatacgggacggtaaaaccggaacaggtaggacgacagcgtggcgacggctgcggtgagtttttgtgtataggcagtccacagatcattggcgcgaatcgacaaataccattcggcgagtatatagtagcgcaatatttcggtggcgctccgttcgacgccttgcagctctgcgtggctgtaaaattcatcttcgtcgcggcttacgcgggctgcgaacgtaaggccgcatgcgtcgccctcggtcgttatcggctggcagtccggtacaatgcgtcggaaatgatgcaacagggcgagcaacgcttgcgcgatgtgctcgtcgaagaaggggcgctcgtcgatcgtcatggcgtatcggtcgaacatatcttgccctgtctcgttttctaacatgcgggcgttgtaggccgtctccgtactcgtagcacggaaaaggttggatttgagccatgacagccggaagagtttgttttcgcgcgtaatcataatatgcggtaaggtctttcggtatgggtactgcgtatctggtcgcgcagcctttctactgtggtttcgtataaggagcggtaaagttggaacagcggaatgtcccgcccgccgtaccaccagcagagcatcccgtatttcagcgcgtcttttacctcaactgcgatactctccggtggtatgccggggtcgaggtacacccgatattgcaacaggtcggggatgaacagcacctcgcagacctgttttcggagggctgtacggagggccttggacacgctgtgaagattgacgtagaacgtatcgagcagcgaccggtcgagcgtatgcgtcgccgcgatggattgtccggtttctgtcgtgcggttgcggtagtcgatgagcgtttgatccatgcactcgttgaacagcgccatgcagtctatcttcacgtcgaatttcataatgcagagagtatttccattgcgcgtgcctcggccgttttcgctccgtttgcatcgttggccacgcctaataccaatgctccgagcatccatgccgtagtctctgcgagccgttcggggtaggtgtcgtcgaggctcgtgtaagcgatgtattcaccttcggcgatgcggtgctgtgcctctgttacgctgaaataccggagccgtgtcccaccgtgtgtaagcagtacgacgggttttgccgtaccgccccgcgttacggggtgatactgacgtcgggcggcgggatgttcttccggaatcgccgccagcaccggacgctgccagccctccatacgcaagcgtgcgagtttgagaaaatcgtccggcaggtcgatttcgccgcttccgtcggtgtgcggcctcaacacgcactccgtaagagcagcccgattcgggattacgtgcagcggagcagccagcaacacccgcctgcccgcttcgtcgatgaactcctccaacggaaagtgcggcccgttggcatcgttatcgtcggggtaaacctcgtcgatgcaccgcagtgcctttgtgatgatgtatttgcgcattcctaccattggatgaacagtacgtttcgtttcgccgcttcgattttgatgtcgtccttcttcatgcctgccggaacgacgtaatcgagattggcttgcagccatgcccgggcggatgccaccgacgttatggtttcctcccgaatcgcgttgtcagggtcgggcagtagcgcttccaaatcgacgggtatgtcgttcggtgccgaagtgtcggcctctgcggtcggctccttttcccagaaagtagttccgtaggcataatgttttttgagagcttcgataacctccgggtcggaggtggtataggtactctcgccaatgccgccgaaataaacctccggctcgaaacggatcgcttccatacgtccgtcccgaaggcggacggacgtgcggtatttcttgttgttgagtacatagaatgtagccatgtcgtaggtctgtttaggcagcagaggtcgtacatctgctacggtgtgtttattttaccgtgataaccgcatgggtatcggggttgagaactgcgagcgtatggctttcgtcgattcgcacgtccgtcgagcgggaaagtccgaccttatcgcgttcgagttccgtcgcttccagcggtttgcgctcggcacgatagatattcgcagggtcgatcacgatcgcggccttgctgtatccgtattcgttcagcaggtcgtggggcttcatcagcagctctccatcgggcgtggcgatacggtggaatgtgataccgaacacgacctcggtattaccggcttcgagctgtttgacgacggtagaggcccccgcgatctggcggccgaagtctttgccatagaacatgacgcggcgttcgctgccgttgttgccgcagaagatgtccgaggcccagccgtagataaggtcgttggtgatcttgctctcggcccccatgtcgaggcgtttgtcgatcttgcggagcatcccgtcgctcatgtatttcacctttcgggaaatgggatcgacgatctgctgcttcactccgaacagcgcatcggcctcgttggtcatgcggaaatccagaagcgcctgttccttcatgtcgagcagcccgaactgtacgtctttctcggtgagtttctggtagagaccttccgatacggtcgtcatgtggatttggcagtagttgctgtcgctgtacggcatctggctggggtcttcggacatacccgcgttttcgtgcttggcgacgccgagacgatagagcggcgtatcggccggcagcgcgggcagcgttgccgcgttgagcgggaaaatcgtgattttgtcttggctgatagcgtctgtggcgacgatgtggcagatgagcggattgagcgagatgccgcccgatgcgacgggagaggcgaccttcgtgtcgttatcgacctcgaaggtcggaaacagcacgttgccgtccaccgagaagatgtgcgcgttcgttacggtgatttgcttcgctccgctcgcttcgccggagacggcgtaggccgttttgatcttactttgcacaccgcgtccgcgcacgctgtaatactgatattcgaccgatttacacgggacggtctcgatttcccgcaggattgtatccatcggaaacagcgacgggttgatctttgtgatcttcttggaaatcgtcgggcggttgatgtcctgttcctcagccgtcccgtcctctttcggcggcttggtggtcagaaccgtgcctctcatcgtctgctcggcggtcgccgctgcgctgccggcagccacgagaaccccgcccagatcgtccggcgcgaaccatgcgaggagttcatgaaacagatacgcacttacagcacatgcgcagacggcgaacaggccgtagagaaatttgttgtttttcatattgtcggtaattgattagaatcttcgtttgttgcggcgggttatcacctcgtcgattatatctttgtccgtttcggaggcagatgttgcctcaacgccgccgccgtctgccggcagtccgtcggtcttttgcgctcgtacacggcgggtctcgatttgttcgttgcgtccttcgaccttacctgtctcgcgggcctcggcgacagccgtatcgtacacccatccttgatagagtttcgtaaggatttctttgttcaccttgccgtcgagcaggttggcgaggatttcgttgtccacccatgcgacgaatcgctgctgttcttcttcgctcaatccttgttcggcgaagaacgcatcgacatccgttttgcttcgggccatattcttttcgcgggtttcgacacgggctttcatgtccgcgagacgtttggtgcgttcctcggcggcttgtttgtaggcttcgtagtccggctctccctccggcacggccaactccgatgaatcgaactgccgggcgatagcgacctgtacggggattccgttggccacatcttcgatgatctgcgcaaattcgggataggcttgtacgacctccataattgtcttgttggccgcctcgtggcctgcgatctttttgtcgctttgtgtgaggtagtcgtagagtgcctgttccagttcgtcgtcgtcgccgaattcccggtcagggaatttggccgtcatgtattcgcgcacacgcgagacgtgcggcgtttgttcctgttcttgaacggtgttttcttcctgcatttttaccgattgattttgtgcgtgatatattctgctgtaaaagtatgttgtttgttaattttcaagaagttataattatcactattattgcgatgaacgcagaaaacatatcactatgagcaaaggaaaacgggtgcgggacgaggttcccgaaaagattttgaagagacacaacgaaatacgccgccgttacgaagagatgctcgcacgtgaacgggccgagaatcccgaacggctgaaatatctgtccaagacttatttcgtggatatgatatgcaaagaccccgtgatcgggttaagtccgaattatgtccggcgcatcatcaacggacgcatctgatgtccgggcaatactggcgcagaatgaaattcgggtaaagcgacttttcgccccgtacaatcctctcaccggcgaagggtcgcccatcgaacgtgtccggctctatttcacaccggacagttatgtacttatccctgcttatatggctgcgacaccgaccgtcgccgctattattgctgccggcggggtcggatgttatgccaccgcagaaggcatcgacctcggcacgatgtacggaaccgtccaccggctgcgtgccgtgtacgatttcgagttttggtgtatttcgtgcgtcaagattttcgataagacgtcggggcgcctcgtgccgttcaagctgcggcgggcgcagcttaaattagtgcgtatccttctttgcgacctgttcacgggaaagcccgtgcgcatcgtgctgctcaaagcccggcaatggggcggcagtacggtcgtgcagatgttcatggcatggatacaactgttccaccgttcgggatggaacagcgtgatcgtggccgacgtggaggatcaggcgcggacgatccgtgcgatgtattcgcgcatggcccggcggcatccggtcgaaatatgttccgttcaattctgtaatttcgaaggttcgagtaaaaataaaatgctcgtcgatcgggattgtgtcgtctcgatcggctccatgcagaagcctgacagcctccgttcgggtgatatgaagatggctcatttgtcagaagtcggtttgtggaaaaaaacgaaggaacgcaaaccggaagatgtgatacagacgattctcggctccgtgccgcgcgagccgttcacggtcgtcgtgctggaatcgacggccaaaggaatcggcaactttttccacgatacatggtgcgaggcggtggacggacgatcggcctatacgccgttattcgtggcatggtacgagatagacatatattataagccgttcgtcagcgagcggcaaaagacggagttcgtgcactccatgacacgcgacgagctggcgcgattccatgccggcgcaacgctggaaggattgaattggtacagggagaagcgacgcgagtattcgaccgattggcagatgtgcagcgagtttccctcaacagccgaagaagcgttccagaccaccgggcgccccgcgcacgatccgctctacgttcggcaactccggccatatacccgcgagccgctctatgtcggcgagctggtggccgatgcgacgtgtggccccgaagtgctgcaaaacattcgtttcgtgcccacgccgacaggtgatttctacgtatggaaattacccgacacctcacgccgcatcgccgatcgttatgtggtggcactcgacatcggcggccgtaaccccaatgccgattacagcgtgatttcggtaatcgaccgcgcggcgatgatcgacggcggtgtggaggagtgtatcgccacctatcgttttcacctcgaccaagatttgacggtgtggcgggccgtgcaggtcgccgagtggttctgtcatgcactgctggccgtcgaagcgaacagcctcgaccccaaaggacaggagggagaccatacgctgacgattctcgacacgataaaagaacactatgataatctgttctcgcggacagaccccgtacagatccgcgagggacgaccgaagcgttacgggttccacacgaacgctgccagtaaaacagaccttgttacgcagatgaccaaacgcctgcgcgaaatcctttatatcgaacgcgacaagcgggcgttggatgaaatcgagtggtatgagttaaagcccgacggtagctatggggctgtcgagggtaagcacgatgatatttatatgagccgagcgattgcactgaaagtgtcgcaactcatggaactaccggtcgaactgcgaacgaatacaacctattcggacgtatctgtcgtatttacggaagcgactatgtagctgtttatatgttaaaatattaaaagcgcgtattttgtcgtatttgagatattttttgtcttatttgcaaaatttaaacagtacaaaatttcgtaattttgactccggaagttacgaaaagagtgtattttattggaaatgagcgtatgttaatcgctcatgatagtaataggttacgatttggttagttatctgctgcattattcttctgcgcgttgcgtaaccttcaaagaactcttcgtatgcaaaagtaacaataaaacgggagattttgatatgaatctccctgatttttttctatctcatacaagttttttcgtaaaagcggttttattcgtcggcacaccatcgcccaaaaggattttgaacgaacgtgtgccgactactgcataagcggagaaaagggctttgcctcacgcctaagcaacagtttagactgatgaggcaagacccatttcttttgtgcttatgccagagaggtgcttttacggcttttcagatgatttttctttttcgctgttcttttgagccggaagcggaaagccgtgtatgaccgcttgtccataaatggaacaagccgtcacccacagcaggcaaaccgggaagaatgattttatctgcccgccccgacacgtctggccagacagataaaaccatacttccttgcagatggtttgcccggtttcacgctaccggctatgttctttttttgttgggggcttccagttttcacggatttctcttttgaagttttctgtctaatctgcctctacttccgtttacctccattttcgcgcctttcagtgggtcgcatcaggcagtcatttccgttctgggcgcaaaggtaactccgggatttgacgggaaagcaaggtcaagcctcctgttttcgggaaaaatctccagccctgcgggtagtattttccccgaaaaaccttgcattccctaatccctacctttttaagcacccgaaacgaaaacgaccgatgcgacagaaagacgcattaaaaaaaatgtcggataaacgagaggcagataagatagtttgaaactcaactccctcagctcttgaatccgcattaaaaacaaaaaatcaaaaacagcaaagatatgacagcaacggcagacttcagacaagtggcgcaatacatagggcttgcgatatgcgccctaatcatgcgcaccgccctttgggtgttcggcatcctttggggtatcgtcagagagatagtaaacggaatgttccgagtggcgataggcataatcgtggcaatcttttccactatcgccttcttcggcttcatcctttggttattcaccctttaatcttaccgatagcgatatgaaaacgacagaccatttcaagagaacgatacagatgtatttggagcaacgtgcagcggaagatgtgctctttgccaagaactaccgcaaccctgccaaaaacatagacgattgcgtgacctacattctgaactatgtgcagaaaagcggttgcaacggcttcacggacggggagatatacggacaagccgtacactactatgacgagaacgagatagaggtgggcaagcctatccagtgtcagatagccgtgaaccatgtggtggaactcaccgcagaggaaaaggcggaggcacggcagaacgctatccgacaataccaagacgaggaagtccgcaagttgcagaaccgcaacaagccgagaaccgccaccaaagcgaccacccaagaagtacaacaaccctcattatttgatttaggcttatgaaaccgagaacacgcatacagcaggaagtcgcacatctgagcaagcgactaccgagattgaccgccacgcaaaaggcatacgctttccttcattgcttcaagcattacgcaatcaagagagcggacggcacgaacatctgcactgagtgcggacattcgtggaagagcgaccacgaccttgcggacaccctttgcggatgtacctgcccccattgcggtatgcagttggaagcgttgcgcacccgaaagagcgttctcagcgagaatgagtacttctccatcgtcaccaccagcaagcaataccaagtgatacgcttcttcttcgtcaagtcccgatacaaggcagggcaagcagccgagtattccatttatgaagtggtgcagaggtggatttcacccgatggaaagacaacgaccgttgcccgactgcgtggtatgtcaatgttgtattacgaccaatggtctgaatacagcgacatggaggtacgcaagaacaacagacttcacgcatacgatatagcacctatgtgtacctatccccgacagcgtttcatccccgaattgaaacgcaacggcttcaacggggactatcacaacacactgccgtatgaacttttcacggctatcctttctgacagccgagccgaaacactcttgaaagcagggcaatacgccatgttgcgccactatatccgtagttcctttgatatggggcgatattgggcatccgtcaagatttgcatccgtaacggctacaccatttcggacggctccgtatggtgcgacaccatagacctcctgcgtcatttgggtaaggacacgaacagcccgaaatacgtctgccctgccgacctcaaagcggaacacgacaagttggtgagaaaacgcaacctgcaaagggagcgtgagcggacggaacagcaacggcaaaaggcaattgaggacgagaagaactatctgaaagccaaaggcatcttcttcggacttgtgttctccgacagccttatctgcatcaaggtcatagagagcgtggaggaaatggtggaggaaggacggataatgcaccattgtgtgggcggttatcacaacaaggcaaactcccttatcctatccgccaccattgacggcaaacggattgaaacgatagaagtgtcactgaaaacgctgaaagtggtacagagcagaggggtatgcaattccaataccgagtaccacgaccgcatcatccggcttgtggaggacaataccgaacttatccgtcagcgtatgaacgcagcataatatcaacctataatacagaataatatggaagtaagatttgaaagcatggtttgcttgtgggacgataaaatccccacgatattccttgagtttatgaacctcctcactttttgtcagagtgaggagcagttaagggcaagtgtaaaggacttcgccgaaaagaacgaacttgacaagtattttcattacggcttcggctcacaccatttctacctgcaccaacgttacacgagtaaccccgaaatggtgatgcaaaacagagtgttgtcagtacatttctaaccttctaaaaacaacgattatgagtacacgaatgaccatcaacggagtaagcacctgcacagaggcaggtacggagaagtacgagaaattccaaacgggtatcggcaggcgcaagcggacacttgtgcagtacgactaccgccacacggacggagaattgttctcttgtgtcaaacccacgttggaggagtgccgagccacacgggacaagtggctgacggcaaaggaaggaaaggagggcaagcaatgaacgcagcaggctaccaaacgctgatagtaaagttcagcaaacctatcgcggaattggacggcatctttgacgatgccgaagcgtggggagtggatacgcttaaaggatgggtagaggactatgagagcagtcggtttaccgccattgacagccatacggcagtcataacgagcgagtacaatatggagtgtgtgaaaacatggttggaacggaacacaccaatagccgagaaaacagaatattgagcgtttaggcggtgtccgcaccgcctaaacataacacccaaagaagaatgaatatgatagcaaagacaattttggaacagataggtggcagacgctttgccgccatgacgggaagcaaagacttcatagacatgggcaacggcttacgcatgagccttgcgaggaacaagacgagtgccaaccgtcttgacatcatctatgatgcaggggcagacctctacaatatgcgtttctaccgcaggacgttcagcaaaaagacattcgagtgtaagacgaaggacattgaatcgcacgaggggatatattgcgatatgctggaggaaatgttcacgatggtgacggggctttacacccgtttttgagcgaggggcggcgaaagccgcctactttctttcagtgagcatgatggcggacaaagaaagtagcaaagaaacctttgtcccaatcttcgatagtattcacaaaaacaattttttatcatggaagcaatcagacagaacggagaaatcatcttgtatagtgatgacggaataggcatgaaaatgattttcagaaacctcacgagcagtaattttcaaggtcaggaatatgtggagtatatccagcatatcgcaatcggtgacatgggattttcacccggtattatagaatattgcagaaatggcgttggcaaagaataatctcgaatgtatgaaaacggaaactccgatgaagccgcaacttcatcggagtttatatggaagagtatacatatatcttgattgcactcacctcctaaatccgtatttttgttcacgctttttaaaggcttcgcgtccaccttccaaaatatcacaaatatgttctcgtattccttgagaagataatatttgtgaatctgttttatctttgcatttagtgttctctaatgctccatgaatatattgaaatttaaaaccgccccaatttggggaatcagtaccattttgattggcaacaattacattctctgcatctgcactaactacaacatttgaattgtgtgttaccaatattatctgacgctctcgtttttttgcgtttaatatatgctaccaattcgttatatatggcacgattgtctaaactatcttcaggttgatctataagtatcggacatcttttgtcgctaaaatctaaaagtaatttcaaaataacaaaagcttgcttcccttctgacatattggcgaaagtatcagcctgatacgttatgccataattaaggctataccagttccgtgataaaaattctacagcaacattttgtgcatcatatccattctttaacagaacatcacctgttagcaagtctttcaaaaaggcgttgctattgctttcattattatcatcataattatttagcaactcttgcaaatatccttgtcgttcataccctctttgattaagcctggtttccaaaaaatcctgtaaatcctttttatggaaattaatatctatatgaatatcaagaccgtcatacgaaattgacagttgttctgaaacttggtttgcacttttcttaaaagaacaatgagcattgattatttgtaaaattgagttgttttgttgttgtaaaattttatcaattttactctgcatcatatcaatagcagcaagagtcttttcttcttcttggattttagtatttaaatctttgagttctttattttcctcaaatatgcggattccttttttataaatttctgagcttatgatagtttgtatttcagatgataattgttctttcgcttttattgtattatttttaagctgggtgattattttattccattctgtttcagtcttgattctcagttcattaaataatctatatgtttcagattgatttaagccgaactgcatacccccaaattgacatttttcctcatacgaagcatcaaatggagtggatattagtattttttcaaatattaataaatcttgttctgcatatgcaatcaattttttcttctcttgaacttgttttattgatgcatctaatgccaatctttcttcgggagttaattctgcacctttttgcaaatcagcaacttttgcttttaataaacttaattgttgattgacaccttccctttttcctttttcagataaagacttttttaaagagtttatttctttctgcatttggaaaactgaaaatactccttctgaaatagccttagataaatccgtcaaatgttcataatacttccttaatacacccgtttcgtctttagattgtattatattctccacaattttatttgtcttatcggaatcgaatgcaatatcatgcatatagctctgacggaaatattcaatctctcgaccaagttgatcattcccatcttgccaacgaatagtaataccatccaaatgttgtcttatgaaatcatctttatcaacttctttattcccatgttttgcagcaatagctttaagtaaagaagatttaccggtagaacgtcctcctacgatggtgtttaaattcggattaagaaggattgtcccatgccaaaaaccttcttcatctaaagttacactatcaataacttgatatatgtttttttcatcaggctttgttgattgaacacgaactcgatcttccggctcaaacaatatctgttttaaaccttcaaatgttgtatctgcttttatccatgtcttgcaatttcctaatctatctttaattgcaatattatcagagaaacagtgtgcatcgctacaatccaataataattcattaaccttttgttcatgcaattttttcttggatttgttgtatttatcaatgtcctgtgccgccgtaaaaacgacatcagcaccattaattatactttttttctcggcaatagaattatcatcccatttaaaatcatcccattccgttttacctatcgctgtaataaacttaccatcaaatatatgattagcattatttaacggattcattattactgaaagttcaagattcaagttattgaatccctcttttaaaggtgatgaatactgactccttttttcttctggtactgaatttattatcttattacctaattcttctaaactttcttttgtgacaacgccaccccattgctgattacaatcaggacttaaagtataatgtgcggtaagggcattaagaaattgctgttgaatctgatctggagttaattcattagagaagataatatgataatttattcttttgaatttttcattaccacaaaattttgccaacctaaattcaacaaccggtaaaactaattcaatattttgcaatctgccttgttctctatactcaagtactttacgataaccatcaataaaaagatagtcattaattcccaaaacttttatatcagtaggaaggtgttctaaggcatcaatatatttatcccaaacatcttctccgggattgcatttgtagttatgttcaagcgaaaatggagtatgaacatgtaaatcccaaattcgccattcagagcctctattcatttattgataatgatatttaattggtttgcgaaggtagtcatttttaagcgaatagccaaattaaaaaagaatgaatgcacgttccttgtatgaaaatgcaaggaacgtgcttgattacggaatatagagcagcgcaaactccgcctttctccgtttgagcagcatggcgtgccgtttccccttgtagttgcagaaggcgatatactcccgataaatgcttctgtcgccagcctccagctttcggatcagcttgcttttgggtatcttcccgctccccaaaagacggtatggaccgacattgtaggcgagcgtggcaagcaggagcgaatctttcccgaactgccggaacatcgcgcagaatttccgcaggtcttttcgcagaagcgcgtccgcctgccgcttcgtcatggtacgtgccgaatacctttcacccggtaacaacttatgcccataccctacatacgggtggtgtttctccgagtgccagccttcaaaatatttcgtgcatcgtaccgccctctcgaatggggacagccggtagatagcagcctgtccgtccgttccctcatgacggctgtcccgtgcggacacggaacagaccgccagaagcgaacaaaggatagttatgaatacacgcatcatcgtgtaaggggcttgaaatttccgacggggacaacagagatagccccgtcatccttcacgtttcggttgttgaagtcaaatttcaattcgtaggagttgctgaaattgtcctccaccactacaatgaagttgtgcgcctcctcaccatccgccgtgtagtacagccggaacttctcgttttcgagcaggtagcggtcattgggcaggaacgtgataccgttgtccattttcagcgttccttctccctcaaactggaaataccggatagtatagagggtattggcgaagtcgcccgtttttttcagctcacagcgtatttcaaccgtctgtcccttcgtcactttgttcggcacaggcatagtttccaccgtgaaaggataggattgctggatgtccatatcgtcgtcacacgaaataagcgtgagcgacacggcggcgaacaggcagagtgccaacgccttgaagattgatgttctcttgttcttgttgttcagtatgttcattgtcttttgatttttaagttattattcttttttcgttgccagttgcagatactcgttcaagtccttgcaaccgtcatagagagcggaacgatcgcagacacgtccgccataacgttctttcagcgtttctaatgtccgccgtccggcttcgtcacggtcgaggtaacagtctatgcacccgtaaccgtccagatacttcatcgccttttccacattggcgacggagttcagcacaaggcagtcgcccgtttccaatccgagcgtgacggcggaaagaaagtccatgaagccctcaaagacgctgcacacgtcagccggagagccttccgccttgaccagcgacacatccttcagaggtacgcatcccttgaagaagcggctgcggatttcaaaaccgcccgccatattcggaaaaccgacggcgaaatatcgcttgccacgcacaccgtaattcagtcggcagcaataccgggatgcaatgccgtaaggaatgccccgttccgccagatagcccgttagtggggaacgaaacagcggggcggcttccactccctcaaagaccggttcggaaggtttaggcaggaaagtcggtctgctcacttcgggaacaggcataggtatattggcggtttccgctatgaatttcacttgctccatgaagtcgttgcttccgataaactcccccgcaagcgtgaatatgtcgccacctttgtccagtccgaagtcgtaccagagctgttttgccacgttcacacggaaagatggcgtgcgctcattgcggtatggcgcacgataccacaactcgttgccgcttcttcggacaggctcatttcccagccgtgcgaggaagtctgcaaggggtatctgcctcatggcgtcgatttccatccgttccatgcggtgcgtcagttaatgatgaacttgatgcccacgccccactgcgtatgaaacttcctcgtgtcgccaccccacaggcaacgctcccggaggttggcgagcagagcgatacggtctgccacgtaaaactccacatcgagcgtcagcgcaccgccgtagatgaaggcgtcccggtcgtgcagcgtggagccgtcatgcagcaccttcttcccccaatttaccgcctcatatccggcgagagccgaagccccggcatagacgaaaacaatctttcgggcgtccgacagtatcttgaagtaatagccgccctccgccgtgaactgcgccacgggtatcttggtgtccttgtagggattgttcttcaacaggtattcgccaccgaacacccacttgttccccttcttcgtgtaggtggagagagccgccccgaagctgtatccgccgtcgttgccgccgggattgaagccgtccgccatgttcgccctgacctcgatgccctgcatcttcggcaggcatcgctgggcgtgcgcctgccccgtacacagggcaagcgacgcgataatcataaataggcacttcctcatggtcagcgcacttgaagttcgttgatggtattggcacgtaccaagtcctcgttctcaatcacgaaagactggtgacgacccccgttcttctcgttgagttccaccacgaggcacttgtcgtcggggatagtgaacttcgccatcgtgaacaccgtgcgctcgctcttcttgcccggcacgagtgtggcgtaattctgcgcacggagcggcaggatgatctgctcctgtacggcggtacgcttcgccaccttcttgtctacgattttccatgtgatgtaatccacatcgaaaggcacgttgctctggttctttatctccgtgtggaaatagagcaaaccattatgcgtgtagatacctttcagcagatactggatgccgaatcgcttgcagccgatgtgcttcacctcgcgcttgttctgcttgtggatggacttcatgataaggcgtaccagcatcgggctttcgctgcccagttccttcagatagatttcctgcgcgttgttcgggcggttcaccttctcgccgtcatggatgaagtcgcacatctccacgttgagcaacagcggttcggaggcatacttcacgttgaaggtgtagaaactcccgtcctccgttatcacggacatattggtttcgttcggaaagttcctcacggtagccttcacgcggatgacgttctccgctccgtcggctttacccgcaatcaggtcgggcgagcctaaatcgacatagcgcacttccgccgggaaaatgacgtgaacggtcttgtcgtaggttacttccaagccgtgcggaggaaccatgcggtcgaaggtcagcttctttgtcagcccgtgatacaggtcgccgtccgcctccttctgcggatagacctcctttgcaaaggtcggttgttcacttccattgttctctccaacagttacgttctcctgcgcgttggcagttgcgatgcccatagcgagggcaaacatcatgattacttttctcattactttggattttagtggtaaataaaaattggattgttgttactttttctgttttcaattcctgtcctgatagagcatgaccttgtacccggctttcagatgtaccttgacggtacgtatcttcttggcgatatactggctcgtgccttgtatcagccccttgcccaagtcggaggcgagctgcgcccctgcgttggtggagatattgatgctgctgcccagtgagccgcccatgttggcggcaacctccctgacggcgttcatttccatagagttgggaatgaagataccgggctgcccgtccgtgtcatacaccgccagctctaccgggataatcgtaccagcatattccagcgaagtaatttcaatatcaagccgttcgccctgaatctttgccgtgcctaccaccaccgcattgcgggggatgattttgtccgctaccgccatcggctccaacagacggagcttgacagcctgtccgtcagtcacgctctgcgccccatagacgcacgccgatatggtgttcttgtcagatacggtcgtgccacctatcgccgtgttgaaactacggttacgctcctgcgcgaaggaggcgacaaactcggcgttgctcatcggctgtgagagcgaggataccacctgatgcgttacctgcctgacaggtgcagccgtgttctttccggctttctgcacggggtaaggctctgccgcctgtccgacaggtggctgtgtgccgttctgcccgcccatgtacttcgccgccagttcgtaggacttctccatgagtgccacttggtcatccatagcggacgccttgcccttctcgctttccaattccgattccagcgaggcgatgcgctccaacagttcgtccatttcctcattgtcgttcttcggttgctcatagaagttgccgagcgtggcattgaggtcgcggtaggcggctgcggatgattggatggttttcggagcggatgatgttgctgttgcatcttccgcatttccgggattggcaaggtcgaagtccctgccgccgtccgtttccgccacctctcggtcgaacatatcgcccagttcctgcatggcgcggctgcggttctcctgccgttcctccatcgctccttgctcgtaggctttcaccttgtcgccgatgatctgacggttcgccttgtcagcgtcgggcatttcgatattgtaaccacccgttcccggttgctgctccttgtcggaagacggggcgaatatcagccacatagcaccgatgaataccagcaccatagcgggcagcactatcattttctgacgtttcagcctttgggcttcggtcagcggcttgcgctccttcttcggtttcccgttgtcgggagccgccttgttctcgtttttaggttcattcttcgtctgtttcatataaataaggtattacattatgattgttttccggctttacggacagttccacctgtccggcatggtctgttactatccggctgccgtcattcctgccgatgtcatagacagctttgccgaaggtgtaaagggcaagcaccgtgaaggcggcgagcatcgccagcacgatgcgcttgcgtgttttcgggggcaaaccgtccagatagcctttgagccttgccaccagcattttctttttgtcgtggagcttccagtacgcacgccaaaatgattttctgattttcttcatgtctgttaccttttgatggtttgtaaatccttgttttcgatgatggtgaagccctcgatggtgaaaccgttgggattgtcgtccgaacgggacgagttcaaaaggcggcacgtggtcacgaggctgcgctcggtgacgttgctctgccggatgatcttctgcgtggcgtaggtcacggcacggtagggatagccgttgaagtcgcacaccacgctgtccaccttcagcacttggttgatgttcccggcgatgatgcggttgtagtaccctttctcggcgaagtccgaatagtagttgtacacgcttttgtccgctaatagcagggcgcgtttcacattatgctctatcgcgctcttttcgggtgagagcgtgaagaacagctcgtggaaacggcgcacgtgttccctcgcttctgccggacggttctgcgacaagtcttgcgagagagccagcatcagcgacttgccgttatccagcacgtaaatcttttctcgttgccgctccgcgaagcggtaggaactccacacgctccataccgttattacggcacacaacgagaggaagacgataccggacaggcgtatctgcctgaacgatgattcgatgtttttaagtgacttaaattccattgttgtttattcgtttttaattgtcagttgattatttcagcagtttcccggcacgtccgaccacgtttcctgcggctgcgcccgccacgctgcccgcaatacttccggctcgtcctgccgtctggttcacgttgcgaccgtagcttcccatgcctccggcttggataatccagcctgctaccgtggggatggtgaagtaaccaatgatgccgattatcatgaagacgatgtacaccccgtcgctcgaatccagcgagaagttcgggtcagcctgcatccgttcgatgtcgctttgcagcatcagcacttgtatcttcgccagtatggtgctgaacatatccgacacgggcagccacagatagacctgtatgtagcggcatatccactgtgtaagcgtgctttggaagccgtcccacaccgatatggcgaaggctatcggaccgagtatcgccagcaccacgaggaagaacgtgcggatggtgtctatcacgagggcggcggcttggaacatcagttccagtatctcgcggaagaagtcgcggatgcccttcttcatgttgtacatcccgcgctcgatgtacatccccgccatcgtcaccatgtcgccgggcgaccagcccagttcttccagttgtttgtcaaactcctcgttcgacacaaggtaggcggtttcggggttgcgcatcatcgcctcgtattccagtttgtctttctgctcacggtatcggttcatgtccagcgtttccgtctccagcatcttcgccgtaccttgcacgacgggcgacatgatactgtttatcgtgcctaataccaccgtcgggaagaacatgatgcacaagcctatcgcaaaggggcgcagcatggggaacacgtctatcggttcggctctcgccagcgactgccacacccggtaggcgacgtagaacagagcacccagcccggcgatgcctttcgccacgcccgccatgtccccgcatagcggcatcatctgctcgtagagcgagcgcagaatttggtgaaggttgtctaaattcataggctaccagtatctttcgttcatgttcccgtacagccccatgatgcggtcgaggtcgttcttcttcttcgcacgcaggtagctcacgctgatgttcttgttggtgtagtagctcacgaggttgcggtaacgcttcatcttggagtagcagcgttccaccacatccatgcgttctttgtccgtcatggagagcgtggtgatgttcaccacgtttttcaactccgtcagcacgtcgttggattcctccaacagcttggtgtagccgaaggcgatggctcccagttcctccaccgtgaagttgtcgtcacgcatcatcctctggaagctggtcacataggtgtcggtaatgtcgcccaccatcaggatggtctgctgcaccttccgggcgtcctttaccagattgttcacggatttcagtgcgtcgtaatacttcttgccctgttcgtaaatcttcaccgtctcttgaaaattttttatcatattctgggcggtcgtggaagtgtgtaccatgttcttggaggtgttcacgatgctctgcgcgatattggacgggtctatcaccgcccactgtgcgcttgtcctgccgactgcaaacaggcacaggcagataataagtgttattcttgttctcatgttactttggattttagcggttatcgttattgtccgcttatcggatggtccggtttcgggttcacgcgcacatagtccccgttcggcgagaaggtcaggatgtccgtcgcctcgttgtaggacacgtcgatgcggaatccggtgttcatgaacaggttgccgttctcctcctgcaagagataggtttccggcttcagcttgcggcggatgccgctccgtttgaacaccgtcaccttataggcttcgccctccttgtagataagcacgtccggcttgccctctacactttcccagttcccgcaaagcaggtcgcggcggttgtccgctacatcgcaggattgcagcatcatgaccgccagcccgattaaacacttgctgacttgcagcattttcgttcttgatatactcatacgcattttctttttgggttgatgaatctgtttttatttattccttgtttcttcgcctttcggccagctgccggatggaggcttcgatgtcgccgcccagctgctccgccagacggtacacctctactttttccgtttcttcggtggtgtacgcgtaggctaagtacccagcgccttgtcatatttctatgataggtttccgggcactcgcccccgaaccggacttacaagtctccctgtatccggctctccactaattaattcagtctgatccgtcggtcggggtctatctttgcatgacatttcgagcagaccgccagcgttttgcgccgccgtgcgatcatgttcttctcccaatcggacttacctttcaggtctttgagtttgcggacatggtgcatttcgagtttgtccgtagcaccgcataattcgcagacttggagtttcagcctttccattaggctgttacgaccgcccgttattgtaactgtccgcgggatagtgtcgcatgaggtagcccctgcgatttttttgcgtttgaaaccgtcgtgatagaatgattggtagagcgttttacccttactgttctcatatgccactttgaacgtcccgtcctttttgtactggaataggattttctttacagacgacttgtactttcttgcgaaagtcttgtacatgctgtatgacatgatgtgatagaaagagttgatggccggactgttattggctatcgagtagtagttgtaaaatccccggatctcggcgttgaactggctgactatttccaagtcatccaaatcgatcatgtacgttctgacgatggatttccatatctctttaccgttttcaaccgctattctcgcagctttatagtcaaagagtttctttcgcatcgtttcgtaattcagatacagtaccggaacgtgtccgagcgaacggattgttttgccgttaatatccttgcgtaaatcgttgctcctacggataaaaatgtcgaatccgaggaacttggcgggtttctgtgcgttggttatcagagtcttctcatctgacagttccagtttaagagcctctttcaaatagttcttaatgtcctcttttactgttttgcagtcttccagactaccaataaccccaatcagaaaatcgtcagcataccgcacatatttcaatcgtttgatactgctgtccatttcattacgcgcggggaacttgttcctttcttcccgaagccgcttgatttcagcggccatctgttctcttaccttttcatctttctcatttttcagtttcttagccagccggtatctccgctgctcgtagagcttgtactgagcgttgcctttccgtatttcccccttgttgaaccgattgatgtattcccggatgtacttgtcgaacttgtcgaggtagatattcgccaatataggactgacgataccgccctgcggtgtcccgctgtacgttctgtgaaacacccaatcttcgatgtatccggcgttaaggaatttgcggataagccgtagaaatctctcgtcggcgatgcgttcccgcaggatgcctatcaacacatcatgatcgatgttgtcgtagaaccctttgatgtcgccctcgatgaaccatttcacggctgtgaatgacttctgtatgctgataagtgcggtatggcaactacgcccgggccgaaacccgtgtgaggtatgctcaaaactgccctcgtagatagcttccagtatcattctcaccacttcctgcaccaacttgtcgttgaatgaggggatgccaagcggacgtttcttgccgtttttcttcggtatgtacgcccttttggacggagctggttgataagtctcgtttttcagactttcaatcagttgctcaatgcgttcaatgctcattccactgacggttttaccgtcagttcctgctgtcatgttgcccggttttgcgtaaatgcgctcgtaggccacataaaacatttccgcattaaacagcactctatacagccgctcaaacttgtagtttgaattaccgctgtgtttagacagactgtttaacacattctttggatttctcatgtctcacacattttccgttaaattgttaaacttaattagctgttccccttcgccatgtacagggcgttaccctgctcggactactatgggaactccgttgccatgccggatattcataggtctacacctaatagccttgcggcgttccggtttaggcaatccccgtttaggaacttgacaactgtttggcgcgatagattgtcggatacgactttcgtcctttactgcttatggcagttgccctgcggtcagttcatgctacgcctgctatctctcatcagtgtagtaccgcagtgtgacgtatataactatcttccgtcaccgcccaaggatacgactgctcggactatcgttcaaccaatgcaggctttatccttatatctatcgttttaacttgccattcagtcgcagcctgatagttggctgacttatggctttaccgacatgctgcactccctgtccggtttccctttcagataagtcggttgttaatgggcctataaactcacgcccagtcgcttgccacagcgacatttgtcaaatccccttacgggcgcaccagatactcttcagcactaacttcggtggcatagaccgccgactgcgtgccgcccagcccaatccatacctctttgtagagccttgacgggttgtttgccatgttgatggagagtatctgcgacttctccttctccgtcagacccaacagggattgtatggcatcaaacttgttcatgtacttccgctggtcgaggagtatcttgcagtcggagttgttgatgatactctccttgacgacgggcgaggaaatgatgtcgtccacctcctgcgtcaccacgatcgcctcaccgtaatacttgcgcacggttttgtacatatagcgcaggtactcagccatgttcgccgaagatagagccttccaagcctcttccactatcagttgcttgcgcacgcctttcaatcggcgcatcttgttgatgaaggcttccatgatgatgatggtcaccacagggaaaagctcgcgattttcctttatactgtcaatctcgaagacgatgaaccgcttgccgagcaggtcgatgttctccgtggagttgagcaggaagtcatagcgtcctccccggtaatactgccgcatggtggtgagcatattatcaatgttgaagtcggacttctccacctttatctcacgctccgccagttcgcggcggtagtcgtcgcgcatatactcatagaaggtgttgaacgaggggacgatactcctgtcagccctgatacgcttgatgtaggcgttcaccgcactgcccagttcgccgctctccgtcttcgttactttgtcgtcctccgacttccagagcgtcagcagcagcgtcttgatgctgtccttcttctccacgtcgaacacgtaatcatcggtatagaacgggttgaatgaaatcggtttctcctccgtgtaggtgaagtacacgccgtccgccccatttgtcttgcaccggatcatctcgcacaagccctgataggagtttcccgtgtccaccagcaccacgtgcgtaccctgctcgtagtattgcctcacgaggtggttcataaaaaaggatttgccgctgcccgaaggacccaacacgaacttgttgcggttggtcgtgataccccgcttcatcggcaggtcgctgatgtcgaggtgcaacggttttcccgtaagcctgtccaccatcttgatgccgaagggcgagagcgaactgcggtagttggtttcctccgtgaagaggcacaccgcctgctcgatgaatgtatggaaactctcttccgccgggaagtccgccgcgttgccgggcatcgccgcccagtagagcgtcgggcagtcgatggtattgtggcgcggcacgcactccatgcttgccagctggctgcccacatcgttcttgatatgcttcagttcctccgcgtcatcgctccacgccatgacgttgaagtgcgcccgtaccgaggtcagcccgtaggaatgggcttcgttcaggtactggtctatccactcgcggttgatgctgttgctccggctgtatcgggatagcgactgcatattccttgcggacttctcgaacttctgcaaattttcctcgctgttgtcgataatcacatactggttatagatgtggttgcaggaaagcagcagccccacgggggaggcgaaggagaggcgacagtccgagcggtcggtggagagtttctcgtagcggatgtcggtagccacctttccgggcatatcctccgcgtcggagagggtgtgcaggcacaggcggttgtcaccgatacgcatttcttttgccgagaggtcgatgtcctgcaaggtcgtgtcgccttcgggcatgagcgagaagtaacgctctatcagcccggcggacttctccgtcccgacaatctcgtcggtggagaggcggcgcagcctcacaaagccgctgtcgttcatgatgcgctcgaactgttcggcggcctccatgaacttcccggcggtttccttgtccagctccttcgggatgatatgtccccggcacagcgtactgaagttgctctgcatacggttacgttctttcgtcgtcttggtcaagtagagatagcaggagtgtttcaggtacggacgctcgttgaagtggcgttcaaaggaacggctcaagaaactcatgtcgtccttctgtaactccggcttgtatttctccttgatgaaccaatcctgcttatgcacgacgcagaagtacggcagcaccttgatagccttgcaccagcagccgtgtatcgcctcgtactctgcgcccgtcacggtgtaaagctccggcagttccacctcaaaagccaccgtgatgtcggcgtctttggagatgatgcagccatgctccaccgccagcagggggaacttgttttccagtgttgtcattttggatgtatttctcatgtcgtttcttcctttcgttgccgtttgagtaatcgggtgatccgccgccggttgataaggtatcggggatggctccttgccgctcccaatttcatcagcccatgttcgccgtaccgggcgttcagcgcgaaggtctgccatacgaggacggaagacgatgccgcgccgaagccgatacatatccactggtcgatgccgaccatgtagaggatgacgaacaggacgaagagagccagcagacctccgcagaagatgaagaggtactgagcctttagacccttgaactcgaccggacggccgatacccttgtttatcgggtattcagccatacattgtatattaaaggaagaatgagcgcaggatagtggcagcgacaatcaagaagatacaagccccgaaccacgaagcagcggtcttcgaggtgtccgggtcgccggaggaaaacttgccatagacttttacgcctccgataagaccgaccaccgcaccaatggcatagataagtttcgtaccggggtcgaaatacgaactcaccatagaggtggcttcgttgatgcctgccagaccgtttccctgcgcaaatgcggaggcggttgcggcaatcataagtgccgcagagatgattaacttttgtctgatgttcttattcataaactgttctttttttgtgccgtccaaagggtggatagtcctttttcgggcggttgatacttgattactttactttgtttttagtggttgcccgtttgtttctacggacttgggtgtgtccgttgcggattggctgtaccttgtaccgccgtgcgcatggtgtgatgccgtcttacgttttcatttccattcttttttagccgttatacatagtcccggatattgaactcgtcaatgttgtcgggtacggtgaattcctttttcggtttcttcagccggacttcgataagccccttgatacggatgctcagttccgtcgagccggacatcagtttctcgtacagttccgttccttccatatcggagaagacctttgccgcacgttcccgttctgccgttgtcgcttccgggttcttggcagctctgaccgcatcgtctatctcgtcaaaactgcttcccgtagctcttggtgtgtcgggcgttccgtcctccggttcatcctccccgaactccagttccgaaggcgggatgctcgtgaaggtttcatcgagtttttcctccgggacttgtgccgggcgggacacggtttccgtgtttccgtcgtcaaaagtagcctcttcctccgacagctcaatgcctttttccgaagtggcggcttcttgcgtcggtatggcagcggttgtccgggttgatgccatcctgaaacgacttttgccgatgatgtccgatgtttctgcgggaggtgtttcccgtgacgtttcctgctttaactccgtgccgcccaatgaccgccacaatccggcaatgcctttaaggaagcggacgaatcttgtttccatgatgcggtcgtaaagcagcaggaacaggaaccacaggttacagccgaccgatacggccagcagaatgtcagtcatgttcatagttctactctggggagtgcgttcaacatacggttcagttcgtcgcggtgggtacggaagaactcgcttaacacgttctcggtgaagtcggcgattgtgacttcaccgtcacccagccagcggacaatcatggcaaccttgtcatgggtctccttactgacagacacttgtttcctttcccttgccttgaagcctgattttttcaggaaggcgcgatagtcattcttttttcttctcatttctttttctttttgatgattaaaatactgcgtcataattccgggcgtaaaggctctttatcgcctcttcgcactggttgaagtggtgtgtaagcacatgatcgatgtaggcggacagcgatagcctgtcatgcccgatcacacgggttatgcgcatgatgcggtcgtggtactccgggcgcacgtatgccatcttcccctcgcgtgcctttacttcgggttcacggatgaaaagccgttcatagtccttttctccgcatttgccgcttgccggcacgggcgacaggatttccacactcgcctgcacttgggcaagcatacctccgccgtcatggtgcggacttttgtttttctggttcttttcctgattcatatccatattcatattaagtcttcacgttgtttcttgtacagttcgtttattttctccttgtgctgttccagatgttggcgcagcacggtgtccacgtagccgcctaccgagatttcccgtccggcgatgtcattcacgattttaagaatcttgctgtgtacgtcccggctgatatagacgcactggcgtgtctttatctcgttgcggcggaggaacagaccggaatagtcgtcctcttgccgtttgcggcgggcgatgtctttctgcaccttctcccttgacggggatgccgtgggcggtggttccgtttccgggacgctctcttcttcgggggcaggcacgggcggctcctgtgcgcggtacagggtcccgtcctgcttgcgtctgccgatggaggctatcaacagttcctcgtcaatgccttcggtgttcactttcctgctgcccatgctcattgaggtttgatgatacggctgatttcttccgagaactcacggataccgctccctttcagaagggacacatccatcgggaagatggtagagcggaatacgctcttgcgctcttccgagaggtcacgccggaacttcttgctgtcgggcaggcgggtggacaacaccgacaaccccatttcggcaatcacatcttcatacaggtcgtacagcccgttcttctccctgccgtccaccatcgtccagaacaggtacagcccttttgttttcgcctgccccgtcgtcatgaggttgtcacggaacatcacggcgaattgcagggtgctttccacgacaaagcggtcggcactcatgggcgcgaagatgtaatccatctgtgagagggtctttaccacaccgttgcttttcagcgttcccggcatatcgaagaacacgatgttcggtttcgcatcttcttcggcaagcatcctttcggcatcgtcaagggcgttgagggcgtcgcttgcaatgaccggataggcgttcttttttattttgcggaagtggtcacacgcgagtgccttgaaatagaggctctcgtcgataagtttcgtttcacgttcacgcagtccgtggatgctgtgttgcggggcgtcgcaatctatgacggcgacattgtgaccttgcacgttgtggaggtagctggcggcaagagccgtgacggtcgattttccaatacctcccttttgtgttgcgaatgcaacgaagatttcattactcatggttctattgcttttaatggttgataaattgttttcctgttcctgtacggaagcggtgacatacatatccgcgtccgtgaatcattatccgggcggtccgtcacgtatccgcttcaatggcgaagccgggattcggataaccggtgaatgacggcattgcgtcatgaagtcattgaatccgtgaatcaccacgtcactggaaaaccgggtatccgacggttcggatattcggtttggcaaatatccaccgaagcggtttgccgggtatctgaaagttcctttttccatatcttcaaatcgttcgtttcttgaatcacgctgcaaataaacaaggatattttggaacttgtattacttctccggcaagtggcagcacgttgcgctggttggcactgattatccggatcaagcctctgtccgataacgcgttaagggcgtaactttgcacccgaacggcagggttcgccgcaggtggcgcagcccggagtttgaaaggcattcccccaatccgtccccgacggatttttatgttcacctgaacatagcaaggtatgttttcagccgctcaaaacattttgagcagccacgaaaacgccttgcccttgcagggggcgggcttaccctccgaagtcgggaagcctctcaaacctgcggtgctgtgcctcgaagcggcggcttatgccgtcaaaccgctaaatccaaagtaatatgagtgaaaaaagaagaaacaaaggcgggagaaatcccaaactcgatccggcggtgttccgctacaccgtccgtttcaacgaggaggaacacaaccgtttcctctccatgttcgagaagtcgggcgtttacgccaagtcggttttcctgaaagcgcacttcttcggacagccgttcaaggtgctgaaagtggacaagacgctggtggattactacaccaagctatctgattttcatgcgcaattccgcgcaataggcacgaactacaaccaagtcgtgaaggaactgaggctgcatttttccgagaaaaaggcgatggcgttgctctacaaactggagcaacagaccgtcgaactcgtgaaactgagccgccagattgtggaactgtctaaagagatgcaggaaaaatggtcgcaaaaatcagcgtaggaaactcgttgtacggcgcacttgcctacaacggggagaagatcaacaaggaggaagggcggctgctgacgaccaaccgcatctacaatgacggtacgggaacggtggacatccgccgggcgatggaggacttcctcgccctgatgcccgtgcggtcgaaggtggagaagccggtggtgcatatctcgctcaacccgcatcccgacgatatgctgaccgacaccgagcttcaggacatcgcgcgggagtatctggagaagatgggcttcggcaaccagccctatatggtgtacaagcatgaggacatagaccgccaccacctgcatatcgtgacggtgcgggtggacggggacggcaggagcatagacacccgaaacaacttttaccgtagcaagcagataacccgcgaattggaacggaagtacgggctgcatgacgcggaacgcaagaatcgccgtcttgacacgccgctgcgcaaggtggacgcctctgcgggcgacgtgaagaagcaggtggggaatatcgttaaggctttgaacgggcaataccgtttccaaacgatgggagaataccgtgccctcctttccttatataatatgacagtggaggaagcacatggcaatgtgcgcagacgtgagtatcacgggctggtctattccgtcacggacgacaagggcaacaaggtcggcaatcctttcaagtcctcgctgttcgggaagtccgtcggctatgaagccgtacagaagaagtttgcccgttccaagcaggagtttaaggagaggaaacttgccgacatgacgaaacgcaccgtcctttccgtgctggaaggcacgtatgacaaggagaagtttgtagccaccctcaaaggaaagggcatcgacaccgtactacgctacacggaggaagggcgcatctacggagccacgttcatcgaccaccgtacgggctgcgtgctgaacggctcacgcatgggcaaggaactttccgccaacgccttgcaggaacacttcacgcagccttacgctggacagccgtcgattccgctttccgttatggtggagggacaagaggacaaacaaggatattccggaggggaatacgagaaccattcgggtggtatgaacctgtttgcccccgaaggtccggcagtggacgccgaggaggaagccttcatccgggcgatgcagcgcaagaagaaaaagaagaagcgcaagggcttgggaatgtaatcgaaaatatcaacaatcaaaaaaatcaatgtatgtcacaacaagaagacgatttgagggcgttggcgaaaatcatggattttctgcgtgccgtgagtattattttagtggtcatgaacgtgtactggttctgttatgaagccatacggctctggggtgtggacatcggtgtggtggacaggatactgatgaacttcaaccgcacggcggggctgttccgttccatcctctacacgaaactatttgccgtcctcctgcttgccctgtcctgtctggggacaaagggcgtgaagggcgagaaaatcacgtgggggaaaatctgggcggtccttgccgtgggcttcgtgctgttcttcctcaactggtggatactggccctgccattgccggtggaggcggtgacgggactgtatatcctgaccgttggcgcgggctatgtattcctgctgatgggcggtctgtggttgagccgcctgttgaagcacaacctcatggatgatgtgttcaacaacgagaacgagagcttcatgcaggaaacaaggcttatcgaaagcgagtattcggtcaatcttccgacacggttctactacaaaaagcgttggaacaacggctggatcaatgtggtgaatccttttcgtgcctccatcgtgttgggtacgccgggtagtggaaagtcatacgcggtggtaaacagtttcatcaagcagcagattgaaaagggcttttcgatgtatgtatatgacttcaaattcagcgacttatctacaatcgcctacaaccatctgctgaaccacccggagggttacaaggtgaagccgaagttttatgtgataaacttcgacgacccgcgacgctcgcaccgctgtaatcccatccacccggatttcatggaggatattacggatgcctacgagagtgcctatacgataatgctcaacctcaataaaacgtgggtgcagaagcagggcgacttctttgtggaatcacctattattttgtttgccagcattatatggtatctcaaaatctatcaaggcggcatatactgcacgttccccccatgcgattgagttcctgaaccgccgctatgaggatattttcccgatactgacctcttacccggaattggaaaactatctttctccgttcatggacgcatggctcggaggggctgcggagcagttgatggggcagatagcaagcgcgaaaatccctttgtcaaggatgatttccccgcagctctattgggtgatgtcggacagcgagttcacgctggacatcaacaaccccgaagaaccgaaaatactctgtgtgggcaacaatcccgaccgtcagaatatctacggggccgctctcggtctgtataactcccgtatcgtgaaactcatcaacaagaaagggatgctgaagtcgtcggtcatcatcgacgagctgcccacgatttatttcaaggggttggacaaccttatcgccaccgcgcgaagcaacaaggttgccgtgtgtctgggctttcaggattttagccagttggtgcgcgactacggtgataaagaagcgaaggtcgtgatgaacaccgtcggcaatatcttttccggtcaggtggtgggtgaaaccgccaagacgctttccgaacgcttcggtaaggtgttgcagaaacggcagtccatttccatcaaccggcaggatgtttccacctccatcaacacgcagatggattcactcatcccgccgagcaagatttccggcttgacgcagggtatgtttgttggttcggtgtccgacaacttcaacgagcgtatcgagcagaagattttccattgcgagattgtcgtggatgccgagaaggtgaggcgcgaggagaaagcctacaagaaaatccccgtcattaccgactttacggacggggacggcaacgaccgcatgaaagaaacggttcaggcgaattacaggcgcatcaaggaggaagtgaagcagattgttcaagaggaactggaacgtatcgcaaatgatgaaaacttgaaacacctgttgcagcagaaataacagattcctttatatgtgaaaaaggggatgtgtcaaaacacccaaaatatgaaaattacccctgtcacagatatctgtagcaagggtaattttgttaaaaagagagttttgacaccctctttttattctcagatttgagatgcttgttgatggtggtaatggcaagcgtcagcaaataatttttcagctctgtatcgtctttaagcagtatgctgtattcttcggcaaacattctcaacagtctggttctgagtttcgacatttcttcaccgaaaggtatctgtcggttttcttgccaatactcaatcactacggaagataccagccacttgaactcggatttcatctctttgccgagtttcttgaagcggatttgttcgctaattggcggctcgttgtatggcattatgtctgccgggtcataaacggatatactgccgataccataatccatgattatcggtaaatcagtttttacatcattcttatgtttcttctttttagccatacccgttattgttgcaggaaacctttacctttatcagtaagatagtatttctgttgcggactcttggagcctatgggataaagtgaaaggaccaaaccggaatttattgccggatggatatagttctttaagaaattccttttatctttcattcccgttttctccatgatttctttagcagagagagtgttgttcccaatagcagacaacagttttcctaactgtggggttactgtggggttactatagggttgctgtggggttgctgtggggtcttgtcctactgtagttcttgtataatgaaacacaatccatacagcattgccgtcggtatgaaactccggatccggaataccgacacggcgacattcgtttaccataagggctatgccacgtccccaactctccaatactgcacttttgtacagcacattggctactatcagattttgtggttcggaattgtggccacccaacagtttctcaatggtaatatcaggcggaaatgttccgctgttttcaatctccacgcggtcatcatagatagcaatcccgactgaactgccggggcgatggtaaacacgatgtgcaaaagcatttatgcaacattctctcaatgccttatatggcacattcagttcctcttctctgtacaaaccttcaattttaccggagagggacaaatgcttgaagaaaaatgccattgcagcatccagcaagttgaatatattgcctgtcacacgctgattatctaaaaattcatcttttgtcgttcctttgaaccgggctaaacggagcagacattggggataatggtagaagttccgtccgaataggacaacggaagcattgttcagctttccatcattcaacaagtcaaatttttcaaggatggttcggacatcctcctgcatagaaccttccggcaaacgtccgcctctgattcctccacgtactgcgcccaagattgccgtttcgtcaaggtcggatattttcaagccgggattttgcatggaatcccaagcataggttccgcctcgctgcataaccaacaggttgtatataccctgcggcatggcagatgtaacgctctctatccgttgataagccctccccttataggtgaacgggcgcatatatcgttgttcttccgctgataaagctataacacttttgttcgttcccggaatgtctgtataggatatatcaatggtcgcaaacggctcgattcgtctgatggtttccgcaatatcgcgcttcgtcttgtcgctcacttcctgaccgataatctttcccttgtcggttacaccgaacagcaccgtgccgcccgtaccgttcaggaaggcacaaagagtttccattccacgctccaactgcccggtagtttctttgaactcaactgtcccgccttcggctccggcaatcagtccgttcaatatttcgaggttatctattttcatccgtcattgattaatacttgcaaagttaatgattttaatcggctttccggcagataatagagtgattgtaaatgaagaaggataagaaaccgtataatccggccgcttatcctttgtttggcattcgtttatctcctcatccgctccaattcatcgtcatgtcgcatcttcgcgttcagtttgtcctgcatcttttcaaggaagtaggtgcgactgtcgcttttcctgcgtttgatgtccgtatagaagcggtagcagtctttggacttcacaccgaaaaaggaatagaggacaggggcaagctctttcagcgaagccttgccgccattgatgcagccggtggcgtagagggcatagattagctctaccaactcgacggcattaccggtccattgcagggctgggactgtggctttggtttcggatgtggatgttagtggtggcacggaggtaattgcagaagcggatactatcttctgcatctttcggatgaaggataacgccttgcggatatacacagtgacgacattctcctccgataccgacaagttctgtggatggtgctgtaattcgatttcggcaaaagccaacgccacaataatatgcttggcatcattgccgccgtagcacaggtttattacttcctgcacgaatccgccgtatgccgtttccgtgctaccgttgtcttttccgtttatcatggcgaaaaactgtgtttccgccagtatgagatggttcattatcttttctgttttgagggtttacacttgtttatcagtgtgcgcacactgatatatggtgcaaatcatagccctaaacacgagaaaagattgtgagaaaattgtactacattgtttttcagaaagataaaattcaaaaataattttatccttgattgcatcccttgtgaaatgtgttcagattctgaacatgtgttcactttctgagcacggaaatcccgccaagatgttcataatctgaacattttatgcccgtggctctttatgataggtaagccggattactccgtccctataagttttgttctccataagccgccagtcattcataggtagtgctgacttgaaaaaatgcgctccgtttccgtcgatggttggaacaacgtatagtatgatttcatctatcacgttcatccgtaacagtccgttggcatattcggtattcccggcagttacttccaacaaatggcaaatgcttccaccttcctccctccattcttgaagcacggataccgaatagtcggatgtcagcttatacagggcattggcacgtatttcatccataccgtaatcttcggtttgaagcaaccgcttccggggatgcagtttcatcggacagccatctattgagataacggcaagtaattgtattttcgccataacgtattttctttcctttttggcgaggcaaaaaagtagcgtgcaattcacactactttcaagcgatggctctggtaaagcctttacggagagtacgtgaatgcacgctatgcgtaagcatagcataagcatcacgcaatcgtctccgtagtttcaatttaccagatttacgcagtatatgtatagaatgaaaacaacatccaataaattgataataaatatcctgtaaatcaaagttttataatcttatttttattttcggttgttttcagtactttcagtagattggctcttgtttggtgcaattttgtttctcatttgtttctcaaattcgatacttattcgtatatttgcagtagaaaaaatgagaaaggaatccctatggcacgagttaagaatcatacaaaagtcaaagagccaattcgtcttcggatgaagtcgctgagcaatggcagcaagagcctgtatctggatatataccgcgacggaaagcggacatatgaatacctcaagatgtatattatcccggaaacggatagcaactcccgcaggcagaatcagacgacaatggacgccgccaatgccatcaagtcgaagcgtattatcgaactgaccagtaatgaggccgggattgtattccgtaaggacaagactttcctgctggattggatgcaggtttatatggaggctcaagagagtgccggtaagaaagatggcagtcaaatcaagattgccatgcgcatactgaaagactatgccggagaaatggtcacactggatcagattgacggggacttttgtcgtggctacatcacttatctgctgacggaatatcatccgaaaggcaaggacatatcgaactacacgcttcacaattattaccgtgcgttgaacggtgcgttgaactctgccgtcaggaagagaaagatgaaggccaaccctttcaacgaacttgagaagtcggagaaaatccgcaagccggagagtatgcggtcgtacatgaccatcgaagaggtacaggcgttgattgacactcctatgccccacgaggaatacgagattgtaaaatgcgcatatctgttctcctgcttttgcggattacgcatcagcgatataatcaagctgaaatggaatgacgtgttcgttgacaggggacagtaccgtttggccgtgtccatgaaaaagaccaaagagcctatttacctgcccctctctcctgaagcgttgaagtggatgccggaacgtgggggcaaatcatcagaagataatgtgttcgacctgccgtccgccaatacaatcagaatgcagctcaaaccttgggcgaaagcagccggaatctccaagcggttctcctaccacaccagtcgccatacgtttgccaccatgatgctgacgctcggagcggacttatataccgtctcgaagctgctcggccatgccgatgtgaaaatgacacaggtgtatgccaagattatcaataagaaaaaggacgaggctgtgaatcttgtaaacggtttgtttcactaattgaaggcattctgtggtccatgtctaatttacaaacatatatttacggcatttctccggttgtaaatgcaaccgaagttaatgcttccatcacatattataaactcaaaaaggtaaatcgacatgaaaagacctgaagacggccttctctctttttggagggagccaacacctgcagcacttcgctgcggacaaggatgtggcgaatgaacttttcgccctgcttaccgaagcaaaaacagtttatctccacgatgttgtgttgggtggtaaacagtaccaccgctatgtggacgatttcgtaaacggacaccggtacatagactgtgaccatgcggcctgccggaactgccacgaaatgaacatccacattgtcaaggggctgctgaccgagtgcgccagttccgtccagccctgctttgccgcaccggatttcacgtttaatgagtgcatgaagttgaaacggatgtatgacacctcggaatcgttgtctccgcttggtccgccccgtatcaaccgacctgcggctctctctctttcttttggttgtaattttaccccggaacagatgaaaagtatagtggcttgcgccaatacttatcatctgttctgtgtttctgtacgcattgaagacatggaggctctcttcgcctgcaagaagggcttttccatccgcgtgaacaatatccgccgtgtggtaatcctgttcgatgcgcttcttgaaaactcgttcatccaatctcggtggcagaatgttctcggcaagggtgcattcctgcagtccaaggacgggacacgctccgtttcggtgtcaaccctgtcttccgcgctgtcatccatcaagaacaacatgacatcggtcgcatacagcatccgaaaggtcattgatcggctgaaagaatgacagaaagtgacaagaagcgaagtatgtgaaaggtaaaagcatgagagttacaatgacacgtgcatagtatcattccccaaatcacggcatcttcgtttacaggacatacctttgacctccgttagcgcgctgcataacggaggtttcatctccattgtcaaaaatcaaactgtgttattatgccgaatagaatgacattcatggagcggatgagcggacggctcgccgccatcgaatcggtactgaagaaattggaaccggtcgaaagtctcttggagcgtattacgctgctggaaaataccatcttcacgaccaagagagttttcacatttcaggaagcctgcatgtatatcggggtttctgaaagtatgctgtacaagctcacatcgagcaaggagataccgcactacaaaccgcgcggtaaaatggtctatttcgccaaggaggaattggacgaatggctgttgcagaattatgaacctaccatgaacgaggctgtgcgcagggtgacggaagccgctgccacagaaccgttccttaacaagagacgctatggaaaacgaaagaaggattgaccgcacaaccagcatggggatggatgaacaccgcctgtcggacatcctccatgcctcgcaaatcaaggcgacggacatttatgagacccctccgcaaatcatctggatagataactcaacgattgccacgctcggcaatttcagtgcatcgaccggcaaggcgaaatcgaaaaagacgttcaacgtctctgcgcttgtcgccgcatcattggcggggaaacaagtattgaattaccgtgcacatctgcccgaaggcaaacagcgtattctgtacgtcgatacggaacagagccgtttccattgccgctcggtattggagcgtatattgcggctggccgggttgcccacgacgaccgatccggagaatctcgattttttctgcctgcgtgaatattcgccgtcagtgcgtatcgaggtcatcgactatgcgctgcgccaacagaaaggctacggactggtcatcatcgacggcattcgcgacctgatgctcgacatcaataatgccggtgaatcggtggaagtcatcaaccggatgatggaatggtcttcgaaatacgacctgcacatccactgtgtgcttcatttgaacaaaggggacaacaacgtgcgcggacatatcggaacggaaatgagcaacaaggcggagaccgtgctggtcatcagcaagagcaacgagaatcccggcatcagcgaagtccatgcgctccatatccgggaaaaagagttcaagccgtttgcatttaccatcaatgaaacaggactgcccgtcattgcggaagtacactcgtttggcgagcccccgaagcccaaagcaagaacggggtttacggagctgagcatcgaacagcaccgcgaagctctctccgccgcattcggggaaaagcccatccggggattcgacaacctgctgcagagcctgatggtctcctacgaggcaatcgggttcaaacgcggccggagtgtcatgataaaactgatgcaatacctgatagacaacctcaagctcatcatcaaacgggacaagttgttctattacgacatgacgcctaccgaggccatgctttttaatgaagaatgaagtcgtgcgcgggcttatatcatttagtttactttagtatttatatatataggggaaaaactaaactaaacctttttttgaaatcaagagaaagaaaaatagatgaccatagcagaagcaaaacaagtacgcatcgtggattttctggcacagctcggccaccatgcacagcatataaaatcggaacaatactggtacttctcaccgttacggaacgagcgtaccccgtcgttcaaggtaaatgaccgaatcaatgaatggtacgatttcggcgaggcgaccggtggcgacttggtggaactgacaaaaaacatttgccggacggacagcgtgagcgaggcattggcgtatatcgagaggcttgtgaatggcgcatctctaccgagaacccgtatgccgaccgctccaccccgaccggtggaggctgaaatgaaagacgtgatcgtgattccactccgccatcacgccctgttctcttacctccaatcccggcttatcgacgcggacatcggccgtatgtattgcaaggaggtgcattatgagctgcgaggccgtcattacttcgctctcgcattcggcaatatatccggtggttacgaggtgcgcaacgcctattacaagggatgcctgaacaacaaggacatctcattgataagacatctgacagaagagacacaggaaaatgtctgtgttttcgagggcttcatggatttcctttcctatatgacactgaaactggcaggcgaccggacggtctgtcttgccataccatgcgactacctcgtgatgaactcggtaaacaacttgaaaaagacgctggcacgtttacaggaatattcggtcatccactgttatctcgacaatgaccttgccgggcagagaaccacagagaccattgccgggatgtatgatggacgtgtcagcgatgaatcctgccactatgcggaatacaaagacctgaacgattacctgcgcggaaagaaacgctgatattctgtgttctcctttgccacctaaagctctccaccacgagagctttttttatgccccgatttctccatttccctccatagagactgcaatatagtacgatttaatagttcgatttttggaaattacataaatctcattaacgaaatagatgtttaatgctcaattattttatggttttatatttcgtgcgtttctttgcaaaatcatactaatacaaattttaatattcatactaaatacatgaactcatatttcatttttgccatcgtcctgacggttgcctacatcatttactacgccgtcatcatagcgcatgacatctacgggaaaaaggggacggacaaaccgaacgaggaagttttcgacctcggcgcaccggaagaggaagagagtgtggctgtcacggaaagcgagaccggcttcagtatcggtagcgagaactacgagacggaaagtacggctacctcttccgaaacatcccttgaggatgtcaaggacaaaccgggaacggcgcaggagaaactggaacggctgaaggccgaggcggaggaacagatggaagagaccacgccttacctgtcggacgcacgcacgtcggaggagatgtacaaggctatgatttccaagggacggttagacaaccgaccggaaataaagtggaacccaattcaagaccggttgtgagatgtcgaaagctaaaaagattctatgtgcgctgtgcctcccgttcccctacacgacttttgccaaaagcggcagcgtgaactatagctggggagcggatgcgttggccacgatgcacgacttcgtggtgacgatgatgctctatgtccagtatatctgttgcgctatcgccggagtttacgtcatcgtgtccgtctgtcagatatacatcaagatgaacacgggcgaggacggcatcaccaagtcgataatgacgcttgtaggtgcgtgcctgttcctgatcggggcattctatgttttcccggttttcttcggctaccgcatataaccttacttgtatcaggtcgcagacaaataaagtattcactaaaaaagtaaacgtatgtttcagaaaaccaaacaactgtgccgcaaggcattcggattcgtcaacggaatccctaccaaagtaatgatgttctccttcatgctgctgtccggcatggtggcgaaagcgcagaactccgcaggcgactattccgccggtacgagcgcattatccactgtcgcggaggagattgccaagtatgtgcctattatggtgaaattgtgctacgccattgccggcgttgtggccatcgtgggtgcaatctcggtatatatcgccatgaacaacgaggagcaggacgtcaagaagaagatcatgatggtcgtgggagcctgtatcttcctcattgcggcggccaaggcgttgcctctgttcttcggtattgccgcttaaacatcaaggataagtatgaaaggcaaggacgaacgctatccggactacccgctgttcaagggactgcaacggcctcttgagtttttgggcatccaaggccggtatatatattgggcggcggtgacgacgtgcggagccattgtcggctttgtcgccgcctactgcctactcggtttcattgccgggcttgtcgtgctggcagccaccgtagcagttggtatcgtgctcatcctcctcaaacagcggaaaggactgcatagcaagaaggtcgctccgggtgtgtatgtgtatgcccactcgcgcaagatctgacgaaagaaaaaccatcacggcaatgtgcatggctttattgattgttgaacgcgggcgggtttgtcttgaagcaaggcgaacctgcccctatttaattacacgtatatcgaaatgaccctatacatcattttatgttttgtcgctttgtgcgctggtatggccttgtcggtttatgcgttcggtacgggcggcaagcgcaagagaatctttcaggacatctatttctcggcggaggaaacggacggtgtgggtgtgctgtataccaagaccggcgaatactccgccgtacttaagatagagaatccggtacagaaatattcggcggacattgacagttactacgacttcacgcacctgttcaccgcccttgcgcagacgttgggcgaagggtacgccatccacaagcaagacatcttcgtccggaaacagtttgcaagcgaaccggctgacggacaggagttcctgtcttcatcctatttccgttatttcaagggacgtccctacacggacagcctttgctacctgaccatcacgcaagaggcgaagaaaagccgtctgttctcgttcgatagcaaaaagtggcgcgacttccttgtgaaaatccgcaaagtacacgaccagttgcgtgacggcggcgtacaggccagattcctgaacaaagccgaagcgagcgagtacgtcgatcgttacttcgccatgaacttcaaagaccgcaccgtgtcgatgacgaacttcaaggcggacgatgaaaccgtgtcgatgggcgacaaacgctgcaaggtgtatagcctcgtggacgtggactgtgcagcactgccctcactggtacgtccgtacacgaatatcgaggtcaacaacacggaaatgcctgtcgatttggtgtcggtggtggacagcatcccgaacgccgagacggtagtctataaccaaatcatcttcctgcccaaccagaagcgtgagttgtcgctgctcgacaaaaagaagaaccgccacgcgagcattcccaatccgaacaaccagatggctgtcgaggacatcaagcgtgtacaagaagtcatcgcccgtgagagcaagcaactggtatatacacacttcaacatggtggtggccgtgtctgccggtgcagacctgcaaaagtgtacgaaccatctggaaaacgcattcggacgcatgggcatccatatcagcaagcgggcgtacaaccaactggagctgttcgtcggttcgtttccgggcaactgctacacgctcaatgaggaatacgaccgtttcctgaccctttccgatgcggcgatgtgcctgatgtacaaggagcgtgtgctgcacagtgaggaaacaccgctgaagatttactacaccgaccgtcagggcgtgccggtggctatcgacatcacgggaaaagagggaaagaataaactgactgataattccaattttttctgtttggggccatcgggtagtggcaagagctttcatatcaactcggtcgtgcgccagctccatgagcagggaacggatgtggtcatggtcgatacgggaaactcatacgagggactgtgcgagtatctgggcggcaagtatatctcctataccgaggaacggcctatcacgatgaatccgtttcgcatcaaccgggaggaatacaacatcgagaagatagacttcctcaagaaccttatcctgatgatttggaaaggggcggacagccagattcccgaaatcgagttccgcattgtcgagcagataatcatagactactatgatgcctatttcaacggatttacaagatacaccgacgagcaacgggaggtactgctgaaaaacctgtttgcggcggccagccgaaagaacccaaacaaaccacccagagaggtggatgagatggtgcgcaaacagatagaggtgcttgaggcacggcgggcggctctcaaagtgtcggaactgaacttcaactcattctttgactactcattcgaccgtctggagcagatctgcaccgaaaatgacatcacgacaatcagctactcgacctattcgaccatgctgcagccgttctacaagggaggcgcgtatgagaagattctcaatgagaatgtggattctgcactgtttgacgagacattcatcgtcttcgaggtggatgccatcaaagagaacaagaaactgtttcccattgtcacactgattattatggacgtattcctgcagaaaatgcgcatcaagaagaaccgtaaagtccttgtcatcgaagaggcgtggaaggccattgccagcccgctcatggcggaatacatcaagttcatgtacaagaccgcccgtaaattctgggcttctgtcggcgtggtgacgcaggagatacaggacatcatcggcagtgaaatcgtgaaggaggccatcatcaacaactcggacgtggtgatgttgctcgaccagagcaaattcaaggaacgcttcgatgaaatccgaaagattcttggtctgaccgaggtggattgcaagaagatatttaccatcaaccgcttggagaacaaggaggggcgcagcttcttccgcgaagtgtttatccgccgggggacgaccagcggcgtgtacggcgtggaagagccgcacgagtgctacatgacctacacgaccgaacgggcggaaaaggaggcactgaagctttacaagaaggaacttcggtgcaaccaccaggaagctatcgaggcatattgccgggactgggatgccagcggtatcgggaagtccctgcctttcgcacagaaagtaaacgagacggggcatgtgctcaacctccgtcccgcacatgaatccaaataagcattgcagccatgaaacgactactccttatcctgaccatcgcctcggtcgcactctgccagacggttcacgcccagtattacagcgtgaactacgacacccgtaccgttgcggcgatggtggccgctttcggtacggaagcggtcgccgaagggtactaccgggagcaggtcgatgacatcctcaagcactacacggcagcggaggtcgctaccgccgggatattcgccgccaagttcttggagcataaagccctgagcgacctcggcatctggaacagccgcacggaaaactactactaccagcgcatctaccggatggtggcggagaaaatcatgcccaagatatgggtggtggcgaagcagatgctccattcgccgcagacggctatctactggggcagttacctgatgaaagtctgcgatgataccaaaagcctgtgtatgcagttcgagagcgtggtgaccaacagcacgctgaccttttcggacatcgcctttctcgaaatcaatccggagattgcccccttgctgaagctatccgaaacgggaaacatcgactggcagcggatgatggacaacttcgcccgcataccgggcaacttcacgcacgagaatctgagaagcgacctcgacaacctttataacacgggtgtcggtcttgcaacggctggcattgccaatctcggtgacgccctgttgcaaagcagctcgttccatgacctgctgggcggaaaggttgaagaaatcggcaacctgtatgaacactacgggagtctattcgagcaggcggaacatgacatcggcggcctgctgattgacatggtgggtggtccggataacgtagccggtctgttcaacttcagcaactacaatcttacggcgtggatgaccgactacctggacgaagcgatggggaactattacacgcagcggtggtacattgcccggcgtgaccaagggagcgtatcgctgtgcgactactatcctccgacggacgacaacagcatcctgaacgggggcgcatgggtgcggttcaacacgagcgacccgaatttctatcccaacgcctcgcaacgggaacaggtacttgccaattcggaaggatatgccggctggtcgagaagccgcgtgcgacagttgaacgaccagaacgacgggttcaactacagcatcaactattggatgagtgcttacatcatcagcaagaaaaacaagcagaccaaaaaggcatacgcatacgaaatccatgtgagcaaaagctggaacaaagaagaggtcgtctatgaggaagtcttcgattcctactcgatggacttgaacacgtttcgggcgcaactgaatgtccggcttgcggagttcaacgaaaacgaggacggctacacctattatatatcttccggtgcgcggaactattaccaagcaacggacgccgccaaattgaagggatgcgagagcgtgaccatcagcgtgacctgttccgacggggttacgctcggacaaggttcgacacagtacaagtgccgtaaatgcggtagttcgttgaacgcccataccaaggagtgcgccatgcagacctcggtgacggaaaataacctcgacctttcggaactggatgcgctgttgaatgaggcgaacagtcaggtcgccaatcttgaagcacgaatcgggacattggaaaacgagaacgctgtcctgctgaaaaaaatcagtacggcaagcatcgaggatgcggcggcctaccgtcaacagtacaacgcaaacaagacggagacagaccgtctgaaaggcgaactcgcggagtggaaaaagaaacagtccgactatacccaagcgaaatcggaagccgcagacgacaacagcgtggcgacggacgactattaccgcatccctgccatcatgcacgactgcaaggcggcatacggtcttacttggcaggacggcggagcatggaacggctactcgtatgtacgcaaggcggccatgccgaacatcaacggcatcatcacattcaaggctgcggtctccattgcccgtaagccgaaatattttctcggcataaaaatacaccgtgccattatccaaatcaagtgggaactcacctcggcttatacggacacgcacgtcgccgacgtgctgacccttgatccgggactttcggatgcggaaaaggccaaactggtaaacgaccggatagccgaaatcgcccgtgagcatccgtcctgtaaaatcacgacggaatacgcccgcagcgcaccgacggaggaaacgccatcaggcgacgtgtaccatctgctgtggtcgagcgaccgccttgagatagcgcgagaggtggacagcagaatcaccaagatatatgccgacttggtatcgctggaaaagatgatgcactacaaacggagcatccttgacgtgatgaaggatgtgctgcccggactggacacggacgaaggccgcaggctgacactcgtggaggaatgccatgaccgctgggtggagaacgcacggacactccgaaacggaaataacagaaatggcggaaaggaggtgcggccatgaaacgaaccatacggatagccctcgtgctgttcgccctgctgcccggtatcgccaaggcgcagtggactttcgatatagtctccgtcgaagcctacatcaacgaccacaagaagcagcgcagtctgctgttggcccgcagtaccttggagtacagcaacaaactgttgcacgagtacagcagtaaggaagtcgggagctataaagaactgaatatcgaccttgaccggtacacccgtgcgttcgatgccatcgatgtcatgtaccagtcgttgcgcacggtgctgaacgtcaagaatacctatacatcggtcagcgaccgtatcggcgactataaattgttgttggaggatttcaatgcgaagatcttgaaacgtggacgcatcgaatccgcagataccctgattatctccatcaatgcgagggggctgagggcgattgcccgtgagggggaacagctctacaagtccgtgagcgacctcgtgctgtatgccaccggagcggcagcctgctcgacctccgacctgctgatggtgttggaggccatcaaccgctcattggacaacatcgagcggcatctgaaccgggcctatttcgagacatggcggtacattcaagtgcgcatcggctattggaaagcaaaggtatatcgctcccgcaccatgcgggagattctcgatgacgccttcgggcgttggcgcggagccggaagactggattattaacgacaaaaagagaagaatatgaacagaaaactattactcatggcagtggcggtcaccgtaacgacagccgtacacgcacagtatgtaacgtacaaccatgattcgtcgaagcagaatcaggtaacggtcatggaaaccggtacgggcgcactctcgcccgacctctattattccgtgctgcacaacaaatacaagaagtcggcggcggccaaaaacaagctctcgttccgcacacttgccggtatcaatctctacaaccaggtggacgaagcggaagccattgattcggctttggtcaagcgggcgaaggtcgaggcgttgaacgttgccgaccggcaggtggacatcgcgtggcttgccgagggcgataaggtcagcagacagatggaacggttccggcgcaacatcgaccgtattctcctgtccggcggtactccggccgacaaggaacggtggacggaatactaccacgtctatcagtgcgccatcaacgccacgaaagacgcctatatgccaaacgcccagcgaaagaaggagtatctgcgcatctacgaggatgtggcacggcagaacgagattttagtgagctacctcgccaagcgtcagaacgcaacggcaacaagcacactgctgaacgcaacggacaaccgtaccctgcataagggcggcattgtccgcaatgccatgagccggtggcaggaatcacgccttgcggtgcgtggctcgcaatcgggcggcaacggaaacggcgaagatgacaacgagagtgtaaacagagggaaataaaaagacagggctatggcaaacggagatatactttcggatttcggcatcaacctgttggaggaggaaatagatgatgtcatctttcagaccaacgagtttctgacggacgcgacttttaccggtgcgcagggacctttttggtggatattgcagatgtgcatggcactcgcggcactgttctccatcgtcatggcggcaggtatcgcctacaagatgatggtaaagcacgagccgttggacgttatgaagctgtttaggccgcttgccgtgtcgattatcatctgctggtggtatccgcctgcggacacgggtatggcggggagccggaacaactggtgttttctggactttctgtcctacatcccgaattgcatcgggtcgtacacccatgacctgtacgaagctgaagcttcacagatatcggacaggttcgaggaagttcaacagctcatccatgtgcgtgacacgatgtacacgaacctgcaggcgcaggcggatgtcgcccacacgggcacatccgatcccaacctgatagaggcgacaatggagcagaccggcgtggacgaagtgacgagcatggaaaaggatgcggcgaagttgtggttcacgtctttgacggcaggagtcatcgtggggatagacaaaatcatcatgttgattgccctcgtggtgttccgaatcggttggtgggcgacgatttactgccaacaaatcctgttgggaatgctgacgattttcggaccgatacagtgggcgttcagcatcctgccgaaatgggaaggtgcttgggcgaagtggctgacacgctatctgacggtgcatttctacggggcgatgctctacttcgtgggcttctatgtgctgctgctctttgacattgtattgtgcatccaaatcgagaacctgacggcgataaccgccagcgagcagacgatggctgcctacctgcaaaactcgttcttctcggcaggctacctgatggcggcttcgattgtagccctcaagtgcctgaaccttgttccggacttggcggcatggatgataccggagggcgacacggcattctctacccgaaacttcggcgagggcgtggcacagcaggcgaagatgacggcaaccggagggttgggcggcatcatgagataatccgcaaaagataatataaacccaataaaaatcataacaacatgaaattgcaagagaaaatcaaaagttggtgcaaggatgagaaattcatgtcctttgcacaggaacgagcgagaaaagaggtttacgaggtggcggaaaaccaccgcatcgacccgcagtatgaagaactggacgaagccttcgagtacgacgaccggtacatcgcccccttggtgacgtacctgacgtacaagctgcgtcttgctctgctgcagcggaacgcaggtaagcgcaaaagaggaatctggtgggtgcttgtccacgtggagatgcagggctattacgtggagatattctcggcggagttcgagaatcttttgacggaacttcgggatgcggtcatacccatgctgcacacggaatatgtacagatgttgaacggtaaaagggaataaccgatggtcatcaagaatttggaaaacaaaataagactggtgggcatcatctgtaccgcttttctcgtgggatgtgtcatcatcagcttgtcaagtatctggacagcccggacgatggtctcggatgcgcagaagaaggtgtatgtgctggacggcaacgtgcctatcctcgtgaaccgcacgacaatggacgaaacgcttgacgtggaagccaaaagccatgtggaaatgttccaccattattttttcacgttaccgccggatgacaaatacatccgctatacgatggaaaaagcgatgtatctggtggatgagacggggttggcacaatacaacacgctcaaggaaaagggtttctactccaacattttgggtacaagttcggtgttctccatctattgtgacagcgtggctttcaacaaggagaagatggagttcacttactacggacggcaacgcattgagcggcggagcaacatcctcatgcgggaactggtcacggcggggcaactcaagcgtgtgccccgaacagaaaacaacccgcacggattgcttatcgtgaactggcgaaccctgctgaacaaggacatcgaacagaaaacgaagatcaactactaaacaacggagtttatgaatatcaagggattcaggcggatgctcttcggtgaaaagatgccggacaagaacgatccgaaatacaaagaccgttacgagcgggaggtgtccgctggacgaaagttcgcccaagcgacacgtattgacaaggctgccgccaaggtgcagggattcgccaacgcacaccggatactttttctggtcatcgtctttggtttcgctatcggagggttcacttggaacatctatcgcattacaatggcataccgcaacagccggccgacacgcacggcgacggaaatgcaggattcggtgctacgggaaagacacaagaggctgcaagggggtgaaataagggaaaatcggaacgagaacaagaaatatgaaccgcaataaaggagtgcttatgaatacacgatttgaaaaatcagtccgctcgtcggacgaatggtacaccccgaaggaggtgttgaaagcgttaggcaggttcgaccttgacccttgcgcccctatccgtccgttgtggccgaccgccgaagtcatgtatgaccggaacatggacggattgtccctgaaatgggaagggcgtgtatggctcaatcctccgtactcgcgtccccttatcgaacagtttgtccgaaagctggcggaacacggcaacggcatcgcgctgttgttcaaccgttgcgattccaaaatgtttcaggacgtcattttcgagaaagcgacgggcatgaaattcctgcgccaccgcatccggttttaccgcccggacggaacacgcggcgattctcccggttgcggcagcatcctgatcgcattcggagtggaaaacgcagaagtgctgaaaaactgcagcattgaaggcaagtatgtacaactcaattaaaagatgtatgatgaagatatttgataaaatcaatttcagggagccgaagtatatgcttccggctgtcctgtatatcccgcttctggttgcatcgtacttcatcttcgacctgtttcataccgaaacggcggagattccggacaaaacgctgcagacaacggagtttttgaaccccgatttgccggatgcccggcttaaaggcggtgacggcataggcagcaagtacgagaacatggccaaatcatggggtaagatacaggattactccgcagtggataacatagaacgagatgaacccgatgacaacaaggaagaatatgaatcgcaatacacggtggacgacatcgccttgctcgatgagcaacagcaggaaaaagctgcggcagcgcaaattgccgatgccaagacacgcgagcaagaagctctcgcggaactggagaaagcccttgccgaagcaaggttgagaggacgcaatgaggtattaccggcgaccgatacggacagtaccgcatcggcgcaacccccgacggcaaccatagaggtcaagggaaaaatagaggaagagagccgttcggtaaaagccccgtcagagaacgaaccgcccagcgaagtggtacgcaaggtaaagacggcttcggattacttcaatacgcttgcggtcaatgcccgtgaaccgaaactgataaaggccattatcgacgaggacatcaaggcggtggacggctcgcgtgtgcggttgcgtctgctcgacgacgtggagatcaacgagtgcgtggtcaaacgagggtcgtatctgtatgccaccatgagcggcttctcgtcggggcgtgtgaaggggaacatcaccagcattctcatcgaggacgaactggtgaaggtcagcctgtccctttacgacacggacggcatggaagggctttatgtaccgaacagccagttccgggaaacgagcaaggatgtggcaagcggtgcggtgtcggggaatctgaacatgaataccggcagttacggcaacagtctctcgcaatggggaatgcaagccgctacgaatgcctaccagaaaacgagcaatgccatcggcaaagctatcaaaaaaaataaggtaaagctgaaatacggcactttcgtctatctggtgaacggacgtgagaaacagtaaaaacggaagccatgatagagattgacaacatatataatatggactgtatcgagggtatgaagctcatggcgaacggcagtgtcgatgccgtgatagcggatttgccttacggcgtgttgaaccgtagcaacaaggcggcacactgggacaggcagataccgctcgaagcgttgtggaaacagtaccgcaggatcaccaagccgggaagccccgttatcctctttgcgcagggcattttctcggcgcaactcatgctctcgcaaccccggatgtggcggtataacctcgtgtggcggaaagaccgggtaacgggtcacctgaatgccaaccggatgccgctacgccagcatgaggacatcatcgtgttctacgaccgtcagccggtatatcatcctcaaatgacgccgtgtccaccggaacggaggaatcatggacgccgcaagacggacggtttcacgaaccgctgttacggtgaaatgaaactggctccggtgcgtgttgccgaagacaagtacccgacctctgtcatttccatacccaaggaacacaagacaggagcattctatcatccgacacagaagccggtagccttgatagagtacctgatacgtacctataccaacgagggcgatgtggtgctggacaactgcatcggttcgggtacgaccgccattgccgccatccgcacggggcggcattacatcggattcgagattgaaccgacgtattgcgaaattgccggacgacggattcgggaggaactggaacgtggtcatggattaaagaaagcgaaataagggaaataaagaaataaacaatatcaacagaaacgatatgaacaagaaaataattgtaactgcatttcttctggcggcaggactttttgccacacggaacgcacaggctcagcgtacatacgaagagatggaacggctgactgtcaatgaacaggtaacgaccgtcatcacagccacggaaccggtccgcttcgtggatatttccacagacaaggtggcgggcgaccaacccattgagaacatcatccggttgaagcccaaagagacgggacacgaggacggtgaagtgctggccatcgtcaccatcgtaacggaacgctatcgcacgcagtatgcactcatctacaccacgcggataagcgaggcggtggcagacaaggaaattcagctacaggaacgggatgcctacaacaatcctacggtctcgatgtccacagccgacatggtgcgttttgcaagacgggtgtggaactcgcccgcgaaaatccgcaacgtggcgaccaaggcgcaccgaatggtaatgcgcctgaacaatatttactcggtgggcgactatttcttcatcgacttttccatcgagaacaaaacgaacatccgtttcgacatcgacgagatacgggtgaaactgtcggacaagaaactttcgaaggcaaccaacgcgcagaccatcgagctgacgcctgccctggtattggaacacggcaagacgttcaagcacggctaccggaacgtgattgtcgtgaaaaagatgacctttccgaacgacaagctgctgaccatcgaaatgacggaacaacaaatcagcgggcgcaatatcagcctgaacattgactacgaggatgtactgtcggccgattcatttaacaccgctttattggaggaggaatgacgatgaaaaagacgataatactgatgcttgcctgcatgtgcgtcttcatgaatgcaagtgcgcagcgtaacagcggccgcctctcgcttggagtgggattgctgtatgagaacggcatggacgtaacgcttgcttacgaacatgaaatgaactaccgccatgcgtgggagtttttcgccaacggctatctgaaatggacggaatgtaaatcttgcggtcatatttgtccggaatccttctggcgcaactatcgcacttacggtttcggtgtggcgtacaaaccttgtgtggtgcgtggacgcaaccattacggcaacttgcgtatcggagcttcggcagggagcgacacgaacaagtttcttgccggaatccatgtgggttacgagcacaattatgtgctgcggtcgggatgcacactgttctggcaggtaaagagtgacatgatgataaaaggggcggatttgctgcggacaggtatcgtgctgggggtgaaactgccgataaaataaaggaaaaacaaaaaacgaaaataacatgatacgaaagattcaatggtttgcaatggcagtgacggcggtattgtgcgctgcctgtgacgcccatatcgacgtacctgatacggcggtacgtccgggacatattctctgcgaggacggtacggctttatcctacgtacagtatgaacagtcgggaaaacgggcaatagcggttgtcttcgataccgaacaccgtgaaggtacggaagggaacggctatgcggtttacctgtgggacattgctccggcagcttttgccgacagcctcggtgtcgcacaagggacgtcggccgacatcgaggctttggacgggaacatgaacacctttgcgctgtacgacacacgggagacggcttcgcctatggcggaagcggtctttgacctgtggcggtacggacagagtgcctatatcccgtcggtggcacagatgcggctgctgtatgccgtccgggaaaccgtcaatcctgtcatcgaacggtgtggcggccatccgctgccgttggatgaaaacgactgctggtactggacatcgacggaggtaaccggacaggaaacggcgaaagcgtggctttactcgacaggaagcggtgcgatgcaggagaccccgaagacacaggcgcacaaggtgcggccgattatcacactgaacaggtaggaacgaaaagagggaaaggacaaagacaatggaagaaagcaaggaactacaaggattttacaagatattccgtgcggtcatctatatctccgtgctgatggagttcttcgagtatgccatagaccctgccatgctcgaccactggggcggcatattgattgatatacacgggcgcatcaagcgatggatgatctataacgacggcaacctcgtgtatagtaagatagcgaccttcctactcatctgcatcacttgtatcggcacacgcaacaaaaaacacttggagtttgacgcgcgcaggcaagtgctatatccacttatctgcggattgttcctgattgtgttctccgtgtggctgttccatcatccgatggaaacgagactctacaccctgccgctgaacatcatcttttacatggcgaccacgcttgtcggtgtgatattggtacatatcgcactggataacatctcgaagttcatcaaggagggactgggtaaagaccggttcaacttcgagaatgaaagtttcgagcagagcgaagagaaggtggagaaccagtatagcgtgaatataccgatgcggtactattacaaaggtaaatttcgcaagggatgggtgtcgataagtaactgtttcagaggaacatgggtggtcggaactccgggcagcggtaagacgttcagcatcatagaaccgttcatccgtcagcatagtgccaagggcttcgcgatggtggtctatgactacaaatttccgacacttgccactaaactttactatcattacaagaaaaaccagaagctcggcaaagtgccaaaaggatgcaagttcaacatcatcaacttcgtggatgtggagtacagcaaacgggtgaaccccattcaggcaaagtacatcaataatcttgcggcggcgagcgaaacggcggaaaccctgttggaatccctgcagaaaggcaagaaagagggaggcggaggcagtgaccagttctttcagacttctgccgtgaactttcttgccgcctgtatctactttttcgtgaactacgagcgggaaccctacgatgtaaacggcaagaaactgtatgcggagaagcggcaagatccgcaaacgaagttctggaagccgacaggtgttgttcgtgaccgtgagggtggcagcatcgtggaacctgcctattggctgggaaaatactcggacatgccgcatatcctttcatttctcaatgagagctaccagactatttttgaggtgctggagacggacaacgaggttgcgccattgctcggtccgttccagacggccttcaaaaacaaggcgatggaacagttggaaggtatgattggtacgctgcgtgtctataccagccgtttggctaccaaagaatcctattggatattccacaaggacggggacgacttcgacctgaaagtgagcgacccgaagaatccgagctacctgctgattgccaacgacccggagatggaaagcatcatcggagcgttgaacgctctgatattgaaccgtctcgttacccgtgtgaacaccgggcaggggaaaaatattccggtcagcatcatcgtggatgagctgccgacactgtatttccacaagatagaccgactgataggtacggcgagaagcaacaaggtaagcgtaacgctgggttttcaggagttgccgcagttggaggctgactacggaaaagtgggaatgcaaaaaatcatcacgacagtgggcaacgtggtaagcggttcggctcgcgcaaaagagacattggaatggttgtcgaatgacattttcggcaaggtggtacaggtcaaaaagggcgtgacgatcgaccgggacaaaacgagtatcaatctcaatgagaacatggacagtcttgtacccgcctcgaaaatttcggatatggcgacgggatggatttgcggacagacggcacgtgatttcgtgaagacgaaaaccggtacaggaggcttgatgaacattcaggaatcggaagagttcaagactacaaagttcttctgcaagacggatttcgatatgagggagataaaagcggaggaagcggcctatgtaccgctaccgaagttctacactttcaagtcgagggaggaacgggaacgcatcttgtataaaaatttcatacaagtcggacaggatgtaaaagacatgatagcggatgtactgaacaagcgtggggcgaaataaatcaaaatccctgcaataatttacgtggttattgcagggatttttgtattccattcagctacccgaaatcttgcggacataaatgaatcatctgacagtttccgatttggaatcgttttccgacagcagattttgtaatttgtcgatgtccggtagagtcttgcgcaaattttccggcatttcttgggctgtgcggtatgtcgccacgcccataggcttatcatagtcgcgcaccatgatttcgacaaactggcggttggcatcctgacataggacaataccgattgaagggttctcgtgcggtttcttgtcggtcatatcatatacagtcagataaccgctaagctgtccgagataattcgggcggaacttgccccgtttcaattccacgattacgctggcattcagttctctgttgaagaatacaaggtcagcaaacatttcctctccggcaactatcaggcgatgctgactgtcgataaaagtgaagtcgtttccaaaacggagaatgaactgcttgatattggttacgatttggttttcgatgaccttttcgttccagtcctgttcgcgttctcccacattctccagattaaccatttcgagcatatactcatccttgaacgccaatgtcgcttttacggcataaatggcttcgggcagcacttgaaggaagttgctcggcaaagatccgcgatttgaatagatgtcttctttcaagtaatttttgagagaggatagcgaccacgcattttgagcggcacaatggatatagaacaatcgttctgcgatgtcttttgaacgagtcaggatttcaatatgatgtgaaaagctaatcttgacaaaatcgtcccaggtaaattcggtattgaccggttgcccgataagttgcagcagtagatgctcgtcaatatccaattcgcccaacgctgttggatgaattaaagccgtacccttttccgacgaatggttttccaattcgcccaacactgttggacgaattaaaaacgtcctccattcctcatagaatgagcgcatccgtttcaaccccgattcagaaaagccgtgcagaccgggcaactcccgttgaaggagctttgatatggtaggcaatgctttagtaccccaacagccgatgcgggaattttcagacacgaatttccccactccaaaatacaacgagagagtttctttgttgaccgcagccgcacttctataccggcagcgttcgatggcatgtttgattatctctactgcctctgcatattgtgtataatccgatgggataacttgttgttccatatacatacgtttttgtgccgcaaaggtacgaaaaatacgggatatacagggcagaatgccaacatattatagtgccgtgtgggtcttattcggtatttttagcgttccggtttcctgcactcgctttgctgccaatctactcacttagatgttcatgcgtctggggcgtgccgagaaagccggtagcggtgtggataagattgtgagcggttggcagtctttgggttggccgcttcctactgtagccgaggaaacacgtccggactatgttgtgctgaccttgcagttagggatgaaaacccgacaagaaaacctcgcaagcaggatttgagaaaagagcaaatcttggagttctgtgttgagccgcaatccctatctgatattttgcaacatttaggattgaaagatagggaaaatcttatggaggtctatatcaatccgatgattggtgcaggggtattggaaatgacggagccggacaatcccacaagccgtaaccagatgtatgtaacggtaaaagtggaacaagaatttcaaaagtaagtttataataggatattgcggcttggacgcatccaacctcatacaaataacactgcccgcgtgaaaatgggggcagtgttatttatatggtagttcgcttatttaagctcgtgtaccgcttaaaagttcggcaagttgccggtcgcagaatttatcgtattcctccttgtctgtaccgctttcgatagcccggtcgataacatcgcccagttcgtcgaagcagacttcttcattgacacactttgcattgctatcatcttctttcagtagatagacctcgtagtaatcagagccgttgagagcgataacgacatatccggcgtgtaaccgtccgtttactttcagccgcagtgccggtaattcttggaataccgtagcgacaaattcgctgactccccacgacataaagacgggtatgggggtaaatgacagtaattgttctttgatggtctgtgcgatgtgcattacatactctttatccataactttgatttttaatatgattattgatttatgttagttgaaccattcggggttatcctcttttaattccgtgatgagttcatcgtccggtaatttgagggtcttcgcatcggcgaaaaagaaaacctcgtcatatatttgttcggcttccttacttgcaaacccttcgctctcgtcctcgaaactgcccggatgaagtgcatcgagcagagcggtagagccgataagtagttcttcaccttcgttggatttcacgatacggcagatgtagatattgccgtcaaattgtagttctttcgttttcatacgcctgttatcttaatgggatatgtctcccgtttgccttgaggtattccatgatacgcttcgcttcttcgtgcgatgcacggttgcggtcatcgtaattgcgtgtctcgtctgccatgaccacgatacactcctttaccaacctgtaaaggctttgctgcagcgtggggtgcatttcggggatagcggctgcaaaccgtttgggattgaagccgtaatcgttcactgctctttcccagtctttggcgagttggtactccttgctttccttgatgttgtccataatcttgaattttaatgatttgtttttattttcccttcgttcgattcctttctgtcggaaccgctttgggattttatggatgcggtacacggctgtcggtacagcttcatacggaaggcttttcctgccaattactctttcagggaaaggaagaatttgcaggaaatacatttcaagccgccggatcaagcgcgacggccgacctttgcatctgataaaaccaaaccggggctgacagggaatgaagctggggaaacgctataaaagggaagttgaaaatggtaaaaaagagaggaaacgaaagctatgaatggaggaagggtgggtggtgacgggttcgtcagaaagttaaaagaggtacttgggtcctttgtccggagcatacaaaaatgaatagagggcggatttcccccccctattcgttatgacaacaacatttgtcaggcagctatttcttccgtttgcggttcggtctgtgcttccgcttcgggttgcggttcatcgggttgttccgcttcctgcgtggcttgttcctgcaaagcggcttttttttccttaatgcgttggtgccgcttttcgtacacttcattatatccgtcttggatattggcaagttcttcgggcatatgcttttgggcgaagccaagcaacagggaggctgtggcgttgttaccgaatgcgtccttgaaattggcaatcagataatccctgcggataacggctttctgcttggcggtaaggttctcgatgatgcgcattttgtcctcgctcgtaaggtagtaataagaacctttatcttcaattcccacctcattgaaatgctctttgcggagtgaggagagcaggaagaaatacaccattttctcctcgtcctgtccaaatttgcgctctgacatatcgacctctaaaatccgctttttggtgtcttcaacggtcttttcgagggcaatctccttgttgcgtttgtcctgcttttccaacttctcgataggtgaaagcggcatttcggttgctgtaccgtttacggtggtagcggtatttgcaacatagcacagtgtaatgtcgttgctctcaatacggagatagagggagatttctcctgcttcgcttcgggtgcggattgcttcgcatttttcggtgtaaccgttcaattcctgcccgtaatccttttctgcatcctcgtattcctcggtggtatcataatcctctttttgaggtgcttgggggctttcggggtatttcgttgcataggttttaaggctttccacttcgtagcccatagcggtaagtcggtcgatgacagcttcattgtaattgtagctttcgtggcagaggggaacggcagggtgctgttccatgagccgcatagccttttcggtaaggtgcgatgtgttcatttccaccaagcaagcgcggttggcgcaatttccgcaaccaccctcacagaacaacatcatattattggtattgtgagggcatgaaagacaaagggttttgtcgaatgaatagcgattgaggtctgcggtgtattgccgttcgatgctttgtgccacctcggaagctttcatgcctcgccaactattgtactgcaccccctctttcagatgttggtcgtacacctcacgctgtatctcttccccataacggcagatttcacttgccacgctgattgtgatttcgtcctgctccaacagcaaagcgatttcgggtatcaaggaaacgaatttaagtcgtgtacggatatatgcctccgtcttgccgaactgcacggtcaaggactgtacatcgtggcgaccgctgtctatgagcttttggtaggcgttggcttcctcaatcggggtcacatccttacgctgcaggttctcggtaatcgccatttcctcggctgtctcgtctgaaatttccatgacgatagccggaatttccgccaattcagccatgagggaagcacggtatctgcgttctccgaatacaatctcgaaacggttgtccgcaatagggcgcacaccgataggctgaagcactccctgctgacggatgctctcggcaagttccgcaaggcttgtctcgtcaaagttcttacgtgggttgtagttactcggctgaatgtctgccaatgctaccgatgtgatgttcttctctactgcttgaactgctgttgttgccataatcataaaatttaattggttgatatttgatttttttattttcccttttttcggttcttttctctgcctgaaccgcttgggatttacagatgcttcaagggactgacgaacaagctattttcaacgctttttccggaaaattactctttcgcaggaaggaagaattttacgagaaatgcacttcaaagcggtgaaatcaagcgcggcagtccaaatttgcgtctggaaaaccaaccggcgatggcaggaacgaggccggacaagcggcaagtggaataaataaaaaagtaatacaaccatgcggttataagaggtaatagaacaggagaacacccaggagggtataaacaggaaaaacgctaccttgtggacgtgcccataagatagcggtatgctataaaaggtatatcggatggggactacaaccgccgtaccggttatttctcgtgcttttccaaatactctttcatcgcctcgttcacgatgtcccgtagagacatattcttttcgatggcgaggtacttcatccgggtatgaatacttttgtttatgacaaagttgcaatgtacagcaggctctttttccgttttgaccggtgcaggttctttcttttgcgtggacttcccggtggatgacagcaagccgtccagtccgcttctcatgccgtttttcaatgaatcacttttgcccatatcgtttttattttaatttcaacacttcttttgctaactccatgtagtcctttgccccgttgctgttcttgttatactcaaagatattcatgccttttatcggagcttcggccaatgatacattgtcccggatgacggtcttgaataccttgtcgcagaacgattcgctgattagttccgccacacttttgttgagcgtcttgcgcttgtcaaactgggtgatgacaatgccgccgatatttaggtttgggttcaaacgttccttgacaatcccgaccacatttgtaatctttgccattccgcgcatggcgaggaactgcgcctgtaccgggataatcaggaaatccgccgatgtgagggcgttcagtgtcagcaaacccagcgagggcggacagtcaatcaggatatagtcgaatttacgggtttcaagcaattttgcaatcagcccttttagtattaattcccgccccggctcgttgataagctcggattctgtcgccgacaaatcgaggcaggacggtacaacggaaagaccgttttccaactcgaataccggtaaggtatattcgcctttcatcgctccgtacaccgtccgttcctcttcgatggagagaccgcaggattccgtgaggtttgcctgaccgtccatgtcgatgagcagtacacgctttttcttctgctgcaatgcggcagcaagattgatggtggtagttgtctttccgacaccgcccttgtggttcaaaactgcgattatttttgtcataatttcgtgtctttatatctgatacaaagataatactatttttagtatttactattattagtgtatactattttactacttttgtatattttagtattatagtatctactactatactaaaatactgattgactaaatgtagtgcattctatcatttctgatgggatatttcctaatatcctactttactaaccttagtatatactacatttagtatttgttgtataacagcaaaataagctcattttggaattagtcttataaatcatcatcatgcgcattagataaattctgtctcaagtgcttccaacaagtcgtgtatttgtttttccgcttcctccatatccgatacaatgtccttgatgtggtaaggtgcgccatttttaccgtgcccatcatttccaatccatagataggcttcgtaatccgggtcaaaaccctcgaaatattgttccatgtcagcaatgagggtatcaatgtcctcacatttcatttcggcactgaaattaaaatcctgcccatagttggtatagcgttggaagtcgaactgaatatttgatttatttttgtcatccacacttatactccagcctttgctttgggatatttccgttactttttgtatcttttcttgagcggtcatagttttgagtttatagtggggagacttcacaccgtcctaccgattgctttaatccgttatttgaaagtaatactcctgcagctcgtctggccattcggcggtcatagagcgtggctttctggttgtcccgctcgtgccattgccaaattttgtgattaagtacaaggcacagctctgtccaatgcttgtagttatctttccattctgccttaacctttctgtatgtgtcagctatggcttcattcccgaacttgtctgccatagagaagtcctgccaaaaggttgtcatcgggtcatagccagtaatttccgctatattccacttgggaattactatttttaatatttccatacttattattgtttttgtaatactcatgaatcaagattactatttccctttgttcggtctgtttgcgaccgccgggaagatttttctgctttcagaaggtggcggggaacaatcggacaaggctgatccggaaaaatacgctcgacagcggagaggaagatttttacgtgtcatttgcggcagtatgccggcattggcaggattggagccgccggttacctttgcggaaaattctgttccgtaggtcgcacggcagcggacttgggtttaatgggaatccgttagaaaaggaaagatttatgaataaaagagtgaggcggccagccgggacggactttccgatggactgtcttgggactacagagggcaggatttatcccgccccctgtaatgccaagtctgtccgtgtccgtccttttgcaaaaaggggcttcacgcactttatgtaacgtgttacacaaaatgcgtgaggctgcttgaagcaaactggccgcaggatgtaaggctatatgagggagaaaggaattttataaaaggccgttggtcgatcggaacaacaaaccgtaccgagactttgcccgatatggtcttgcatataactcagtctatgtcatagcctatcatgtattcatcgttgataagcagataatagtagccgttgccacaattcctgtattctttgctgaatccagccgccatatctccattttcgcgtggctcacaccataacgtaccgtcatagccacaaaagtcgaagcgtccggtggaaaacttttcgccttgcttcagtgccgttctgaaacgagccatatcccaactgccgcaatacttctcgatggtggcaagtccgatacacttgccgtcgatgcgtgtgccggtcgtgatgcggttctcgtagagggatttatccaaatcggcattagcgattttgcgaagccaatcattcgtatgcgtggcaagtcgggcaagtttctggtatttcaagacctgtttctttcctatgtccgctgcatcttcgggagaggatgacggatagtatatcttctcaatgcttgcccaatccgtgaagatgtacccgctttttcgttttcttggcgcaataatgccgatgacgttttcattgcggttgatgaataatcgcctacgttgtcctgcaatccttacatataaagaggtggaattctgctcgtttcggagataggcttctgccggatgaatagttgttgtttccatatttgtataaattttgatttttgctgttcctattttggtttacctgttcaaagttccgggattgtgccgttcttatatagaacaccgtcccgataatgggacacgatgcccggcttaagtcccatttcctcaaaggctatatgcctgatatagtccttgtattctttgccaatgaaattctttccacaaaggttgttgaaaatcatagggacggaaaaaccgtcttcgctcgataatatcactttgtcgtcttgtctaatttcttctaccatacttgtttacttttaattggttgaactatcatgctgatttttctttttccctgctttcgtttgccgtgcaggtttgttttcagctttttgaggcagccagaggatgaagctgtggcatcataagccaaacccggatagaaaaccgaccgtgtaacagtctgttttcgtcatccgaatgcaatgcggcttggcgattatgcgcttcgtcctacattcgccgacgaaaagagtaaagaatgacctgccggtaaaagcaaggattttgtaaaaaagaagagtcgtatatgatagaaaaaacggcttgggatgtgagaaaataccctgaaaaatttgcggtgtattgtattttatgtaattttgcagctgtatttcaaaattgcataaacagtatggagacaaaatatatccacagggagctatccgccgtgatagaagaggcttaccgctatttttcagtcattacggtaacaggaccgcgccagtccggaaagacgacgctgctccgcaacttgttctcacacctgccgtattactcgttggaaaatcttgatgtccggagtttcgccgaaaacgacccggtcgcttttctgaaccagcacacggagggcatgattctcgacgaggtacacaacgctccgaacctgctgtcgtatattcagggtatggtggacaatgatgccgaccggcggtttatcctttcgggcagttcgcagtttgccatgctgaaaaaggttacgcagtcgttggcaggacgtaccgccgttttcgagttgctccccctgtcatactccgaaatacgggagcaggtcaccgatacgcctcttgacaacctgctgtttaacgggttttaccctgccatttattcgggccgtaacatacccaaatttctttatccggcgtacatgaaaacctatttggacaaggacgtgcgcgacctgctacaaatcaaggacatgatgcagttccacacattcatcaggctttgcgccggacgtatcggatcgctgttcaaagcctctgaactggccaacgaaatcggtgtcagttcacataccgttacggcatggctgtccgtcttacaggcatcttatattgttttcctgctacctccctatttcgagaacacacgcaaacggctgactaaaactcccaagctctattttacggatacagggcttgcctgtcacctgctcggcatcgaatcgccggaacagcttgcacgggacaagatgcgtggggcgttgttcgagaacttcatcgtaacggaagccttgaagcggcggtataaccaaggcaaggaaagcaacctctatttttacagggattcgaaccagaacgaggtcgatttgctgttgaaaaaacattcggggctatacggtattgaaatcaagtcggcgatgacctaccatgcggacttcgagaaggcgttgaaacagatggacggctgggtcaaagaaaccatactgggtaaggcggtggcctatgcgggtacactcgaaaatactgctggagaaatcaaacttctgaattacagtcacctggacgaggtgttggcttaacagccctataacagtccagctaatgccgacacacactcctgctgcatggatttgatgtaatcgaagagaaccgagggattgatattcttgccatttagcttgcaggtgacgtgtaagtgctcgcctgtacttcgtccggtcgagccggtaataccgacggcatcgcggggacggactaccgtacccttggcggccagcacccgtgaaaggtggcaatagctgacggtgtaatttccgtgccgcagtgtcacatacttgccggacgtcttgtcctgtcccactttgacgaccaccccctccatcatggccaatacctgctcgccccgtgcgtgcaggtcgataccgccgtggaacttcctcttcccggtaaacgggtctttccggtagccgtatggcgatgtaattctgatgcgctgcaatggataagacacactgagataacggtcaatccacaacttcttactttcatcggcaggttttgtcgaagtctcctgtgcaggagccatgctttcgggtgtcggctccggctttttcataccctcctgcaaggcttctaccttgtatctttctggtgtcttggcaatcgtgttgaactgcgcctgaacgggcatcgtgcagaatgaaatacccgatattgctatcagtagaatttttctcattcggcaaagttataacgggaattttcatgtcggaaacaaactaccgtcatttcttgtattggtttgatattttgcgtctattagtacgattttgattagataattgtactaatgaagataaaaacagcatattacaaccatttatatagctgtatttttgtccgtcataataagatgtctctatctttgtatagtacaattttataatatgaatatagtatgaaaaaagttcagattgaatttgatgaattacccttttcgacactggaacgattcggtcttacaagggaaatgatcgaggacttgccgatgcgtgtgttggaagacatctgcaacggccggcattctcccgtgcttcccgtgcgtgtcactgacgagcatggcgggcaaatcgagagccgcagccgctttgcctttatccgcatggacgacggtcaggtggatgtggtgttctatccggcactgaaatcctctccactggagcggtatgacgaagcacagcagaaacagttgctcgacggcaaggcgattgtcgccgatgtggaaatgtcggacggacggagcagcaaggctttcgtacagattgacgccgagacgaaacaggtgatgtatgtccccacgcccatcatcgcacgcaacctgaaagtgctggccgaggtcatgcgcctcggtacggtggaggtaaacgggatgcagcacggcgagccgctgacggtagtcgtgggcggcgagcctgccacagtgggcatcgaccttcatgccaagaccggcatccgcatctgttcgggcgacgcgcagcaatggcgcaaccaacccaagcgagagtgggacaaatacaccttcgggtgctacggctgctgggtcatggacgatgacggtaaccttgattacgtttcggaggaagactacaccgaagagctgtggaacgaacagaagaagagcggcgagcgcaatcgtgcgacagctctccataagtaaaacatcaatccgtacattatggcacagaacgaatattatcccgaagacgtacttgtcgggaagatgcagagcggcgaatacggctggctcgattacgtcaatcatttctccgccgactggcaggaggaatacgcccgttactgcgaggaaaaagggcttgcagtcggcaacgaatccgccgccgagttcgtccgcttcaaggacgaacagttggaggcagcaatggaaagcggagacgcataacgaaaacaatcagactatggcgatacgaacgaataccaatccccggcagatggacttgcagcccgaaatgcgcgatatgctgatgcgcaacgggcttcaagcccatgttgcacttgacgatgcagggtatcggctgatcgtgcagggacatgactcgcccctgctggtctatccgatcaccgaacgtcagatgttggcactcacggactggggaacgaacactgccaacaagaaggcctacaacgtgctgacgagcatcgtgggcaaggacttctatatgcccaagaacttcgtccatgcccgtaatgccaacggtcgtgtggctatggggctgcacggctaccgcatcggcatcggcgagtacgggcgcatggggcgtatgggaatgcccccgccgttccttggctggacacctcgcaaccagtggggcttccacctgcgcagggtcggcggccaactgttctttccggggccgtccatcgtacccgaacgccccgacgggcgcatgaagcccggcgaactgcaatcaggcggttacggcttctattacaaggggcatcaacaggagcagcccgtacagcaacgggatgtgctgcaggacttgcaggcggctatcacgccgatggtcagccgtccacgcagcgaggaaccggcacgaccgtacaaggagcttatagcctctccggtctatttttccaacgagaaatgggcggagtgccttgcctcgcacggtcttgtcgtggatgtggaaaggcggacgctaaccgtgcagtcggaaagcgtccaagccgatatggtttatgacctgacggaagaggaagtgaggacactggttgccgcacccatcgaggaacaacccgtagaaaagcgtctggaactgctgaacggcattatcggggctgacttttccgacaaagtgacgatggaggctctcaacagcgatcagcgcatcgctatcggtctgcatcccgaagtacagcaggatttggaacaacgccagcggcaggagcaggaggctttcatgccggtggaaacctcgctgcaacagcaagaggaatccatacagggagatatcggtgcggcggtggacgggcgtgacctccagtttctgaatgaaaacaagggatggtatcgggaagagaaacacgggcgggaagtcgaagtgagccagatagccgttcaacctgcacagactgaggggaaatacaggatgaccgccgttatcgacggtcaggctatcagccatgagataacccaacgggactacgacaagttccttgcagtggatgactatcaccggatgaaacttttttccaagattttcagcgaagtggacatgaagacacgcccggaagcacaacggggtctcggcacgaaaatctttgccgccctcaccgcaggtacggtagtcgcggcgggtgtcgcgcacggcatccatcatcactgccatgccccggagttctacggcgagcgtttcggcggtccgccacgcccgtatttcaaaccgggtgtcgatacgccgagggatgtagccatccgttgtttcgaggcggaaatgaaccgtgaaatcaatgatatgagaatggggaggtaaaccatgagagagggcgaactgacttatgacgattttctgcgcaggctgaacattcaggacgtgcttatcgacgcgggctatcacctgaaccggcgcgacggcctgcgctatccctcgtatgtccggttggacagcgaggggcggcgcatccgcaacgataagttcattgtcacgcagcaagggaaatgctgtttcaaaccgcaacagcagaaatcgtataacatcatttcctttatcaaggagcatccgcattttttcgcggaataccgtgcaggcgtatctcccgaccgactggtaaaccttgtctgtaaccggttgctgaaccaacccgtcgctgaccgggatacccggattatccagcctaaacgggatgtgaagccgtttgacatggcggattacgacattcaccacttcaatccgcaggatcgggcgacacaaaagaagttctatccgttcttcaagcatcggggcatcgacctttacacgcagtatgcctttcatcggaacttctgtctggcgacgaaacaccgtgagaacggcatgaaatacaccaacctcgcctttccgctgaccgttccgaaagatacggaacaggttgtcggtctggaagagcgagggcgccctcgcatggatggcagcggcagttataaagggaaggcggaagggagcaattcgagccaagggctatggattgccagcccagccaaaactacgcttaccgaagccaagcatatctactggttcgagagtgcctacgacgcgatggcctattaccagcttcatcaggcaaacgacaaggatttgcggaaagcggtcttcgtatctaccggcggcaacccgacggtggaacagatgcggggtgtcctcacactcacgcttcctgccaagcaacacatctgtttcgataccgaccttgcgggaatcgagtttgccaagaacctgcaacaggagatgtaccgggctgtccgttccaccatcgaggagacaccggagcggaagccttatctggattccgtcgctgacggcaagaacctcgatgaaggtgacatagacctgctgcccgacgctttgcggtcgagctacgggaaatatgaatccgcatgggaagaagccatgtcgatgcgttcgagcggcctgtgccatccggacgacatacgagaacagacggatatcatgaacggaaattacaaggagttccgtgaaggattgcgggagttccttggtctggacaaggcgaatgacgccttttttgtccgtgaacagcctacctatcccaacaaggactggaacgaacagcttttggccgggcagaaacaggaagagacggtcgatgagacacaggcgagagaacagtcaccggaagaggaacaacaaacatactttcgccgatgatgaccgatgcacccacaggacatttccaaagtatcgtgctgcaaccgcacgccggacagttcgtcatcgacgagctgccagcaatcgtattgtgctgtgcagcatgggtgtacggtggcatggagggactgcctctgacagctcttgccgtaccggttgccgcattactttctttggcattactgtaccgtttcatctatctgcgccggacacgctaccacatcggcagcgagcagcttatcagccggcatggggtgttgtcccggaagacggactacatggaacaatatcgtatcgtggactttgtggaacaccaaagcctcatgcaacagctttgcggcctaaagacggtacgcatcttctcgatggacaggaatacaccccggcttgatttggtaggcatcagacacaacttcgatgtggtaacgcttatccgggaacgggtcgagtataacaaacgaaaaaagggaatatatgaaatcacgaatcattagtctggtcatttttgccctctgcctgatgccacactgggcaaaagcccaaatcacggcgtccaatccgttggaatggatggcgttggccgagggcaacgaggttgtcaatgaccaaatagagaaacagataaatggtcagacgaagacagctatgctgcagaacagcatcgccgccgagtttaaccgcatccacaaatgggagaagcagtacaacagttatcttaagacggtaagcggctacgcttcatcgctgaaagcctgcacccatctctacaacgacggcgtgagaatctttctcacgttagggaaattgggcaacgccatccgaaacaacccgcagggcatcatcgcctccatgagcatgaacaatctgtatatcgagacggcaacggaactggtatcggtcttcacgctcctgaatgacgcagtggccaagggcggcaaagagaatatgctcacgggtgcggaacgcagcaagaccttgtgggcgttgaacgacaaactttcggttttcagccggaagctgcacctgctctacctgagcatacggtactataccctcaatgacgtgtggaacaacgtgacggccgggatgctcgaccgcaacaacggagaggcggcacggatggccatgtcccgttggcgcagggctgccgtccttgcacgataaaatcaggtgaatgatgaaacggacgatttggataggcatcttattgctgtgcatcggtatcggcaaggttcgggcacagaacgaccccgtgcttgccgggatgatcctgctctataccgacaaggcggaaaaggagctgaagaaccaggagaaggtcatgctgatgcagaccaccggacacctgtggacgaaagaggaagtgaaagccacgaccgacctgcaacgggagttcaacaactatttggactctttccggtcgataatctgctacgcagcgcagatatacggtttttaccacgaaatatcaaggctgacggacaatatgggagactttaccagacaggtaagccgcaatagtcccaacgcgctggccgtcgccctctccacgcaacggaaccggatttaccgggaactgatcatgaacagcgtggagattgtgaatgacatccgcatggcgtgcctgtcagacaacaaaatgacggagaaggagcgcatggaaatcgtgttcggtatccgtccgaagctcaagatgatgaacaagaaactgcaacggctgaccaaggcggtgaaatacacgacgatgggcgacatctggcgtgaaatcgacgagggggcacgcccggcagccgacaaacgggatatcgtggaagccgccaaaagacgctggcggcagataggaagaaatgtaagaccttaaaaacagacaacgtatgggcgtttggagtacactattgaaatatagcggcaaggccgcaaaaggtgtcggtacggcaacggcggctaccggcaaaagtatggggaaagcggtgctgcacccttcgcagaccttgcgtggcgcgggtcaggccgtcaagacggcgaccatcggcggcgcggtcggttatgtgggctgggagaagctgaccaccgacaaaagcgtggtgcgtatcgtgagcgatgccgttgtgggcgaatccgtcacggataccattgcatgcacggcggacggcgtgcgtgaactgacgggcaaggcaggagaagccgtcagttcggtcagtggtgcggtaaccggcatcgacaacaaactgaacggcgtgtcgaactttttgcgacaagcctccggtggcggaggtcttgatatgttcggcaactttttccgcaaccttggcagcggcaacgtctccggattgagtattgccggactggttgcggcggcgttcctcatattcggacgcttcggctggctgggcaagattgccggcgcatttctcggcatgatgctcatcggcaacaatgctggtgtcttccgcacgccggagacagaaaacgtgcaacgcacccgtacacctgacttttcggcaggggaacaggcacatggaggaatgagaagatagaatacgaatcaaaatggaaacagcatgaaatatacagaagaaatgatcctgcaatccgagagcggctattgtatgcctttcgaggaacagcagggcaaggacgtggagctgtcgctcggctacggcgaacagaccgacccggcgacgggcgagaaattctttcatcacggcatcgacttcaacgtgcggtgctatacgctttccgcccttgccagcggcatcgtgtcgggtgtgggcaatgatagcggacacggcatctgccagaccatccgctacggggagtatgaggtgacctacggaaacctgtccaatgtcttcgcccaattcggccagcgtgtgaaagccgggcagacggtggccctgagcggcgacaagctgcatatcgccgtgcgtttcaagggcgaggaactgaacccgctggagttcctgacgatgctgtacgggaacattcaggcgatgcgtcaagccggaggacatgaggcagactatttctccggtctgaaactgaaaaccgattacgaccgggacaagagggagattgaggaactgatgctgcgcttcctgccgcactatatggaggatctgcgacgtgggacatacaccttaccccggaatacggaacaatcgctacgccacatcttcacggtgggcgcgatgaaggagtatttctacgagaatatgccaagcatggccaatccgctcggactgggacacaaagccctgccactggcctgcaaggtgcagaacctccttattgcggatttcctgcattacctcgccttgcggcatgatgtgtacctctccactgcgggcagtgacataaaaaaaaactccatgacgaagccctgacctatggcggcatcatagacccgttggcggaactggacatcaacatacagagcttcgacataccgaggcttgtcacggtctatcccgaccgggcgggtgtgcgctggtggacgaaggcatggttcaacaaccgggaagagggcgagacatccgtcgaaatcgaacgggagcaggcaatacggttcatgcaggacaacatcgagaaggacgcatggctggaagagttctttccccggcagatggaggtttaccacaacgccatcgagcagacgaaagaacagttattgaaacagataaatatatagtacacaatatggatggaatcaaatatagccggcaattcgcggaaatagaacgtctcgtgaacgattatttccattgccatctcgctcccgtcatgtcgaaaacgcaggcttatctcacgaagaagcagggcgaggaaatgagggagtattccacctcattgggcggcatactcagcgcgatggcgtctgcggcacagccgatgggcgacccgtaccaggtactcaaggttacaggcgaatggaactcgaagacgacggaggactacatcgcaatgtgcaaggcagagattaccggctccaaggagatacagcaagacctcgcatacatggccggacagtggcgcgataccgtcgtgcgggaaatcgggcgtgagcggtatgacgaactgtcggaacaattgggcggtgatcttgcctacgcctatatggactaccgagtggaggaacagatgattgaccggctggtcaaggagcgaatgccgaaatcgtcagccgactacatcatccgcaaagctgccgaatcgagcctgctcggactttcgcaaaccttgaaccgctcgccgctggccgaggaaatcgaggcacggggtgaagccgcctaccgtccgaatggttgggaaaagggtgcaggacgggtgttaggagcaacggcggataccgtcatgatgggcggtgtgggttcgtgggcgacactggcaaagtttgtcggggcggacgtggctatctcggccgttgcctcacgcttcgagcctgaaaagtcgcccaagctctctgtggagcaatgtatcagtaaaggagtgttcggtagcgaacggaacgtgtttacggacttccgtaaggaggctgcaacagtacaggcgggtgatagtgcgcttattgtggcggccaacgagcagttgaagaaaaaaacacctgtgatgaactttaattttttggagtggatgcaggcaccaaagtttaccccttttcaaatgtccgaaatgctcggacaccatgaaaagaaaaatgaacgtgccgaacggtacaaggatgtgccgctcatcgtcgctcccggacaggaagaagcctatttgaagcatttggagaaatataagaatgcaacgactgtaactgccaaaaaggagtcaacacagccggaaatggaacagtgggaaaaagtggagaaagaggaacggcaggtggttattccacgtgaggaagaaaagcaagagagagaagctgtgcagaccaacacgaacggatggagcggattgctcggtacgttgggattagagggattgggcgatatcacgggcaacctcggatatgtcatggctatgctgcccgacatcctgttgggggcttttaccggcaagacacaatcgttgcgctttggggacaacctgctgccgatagcgagtattgtggccggtctgttcgtgcgtaacccgctgctgaagatgctccttgtcggtctgggcggcgcaaacctgctgaacaaggcgggacacgaggcgttggggcgacctatgccgtccgctgccgaatatacggacaaacagtaccgccgctattccgacgaaccgctcaatccccgtatcgtgaatccggtattgcaaggcagtacgctcatcgccacgatagaccgtatgccttgtaccatccagctcacgccgaccgtcgcggaggcttaccgtgcaggggcattgccactgaatacgctggcgaacgccgtgcttgccaagagcgaccagttgcgccatatcgcctcgcagaattacgacgacggacagcgggaaacgattgtgcgcacacggggcatccaataattccaggaataacaaaagcatgatgatatgaaagaaaagtcgcaaatcgaaaagaaggccgaagcaaggcaggcggaactgctgtccgccgcattgggcggggcatcgaacgccggcggccattggctcaacgtatcgggcaagggatttccccggctctatccgcaaggggtctcggccagcccattcaatgccctttttatggccttgcattcggacaataacggatgcaagaccaacctgttcacgctttacagtgaaaccaaggcacggggtgctgcggtgcgggagcatgagcagggcgtaccgttcctgttctataactggaacaagtatgtcaaccggaacaacccgaatgaaaccatcgaccgcaccgcctatctccaattggacgaagagcataaggcacagttcaagggtgtccacaaccgggagatccgcacgcttttcaatatcgaccagacgacgttgccctacgttgacaagccggcttacgaggatgcgataaagcaggacggcagtgttcaggaaagaggatatgccgaggcggacaaccgcaggttgcgcacccggttcaacgattttctgctgaagatgcgggacaacctcgttcccgtgcgctcggatggtagcggagttcctcattacgagacagacaaagatgcggtctatatgccgcgtcaaaaggattttgagcattaccacgattatgtgcaggaagccttgcggcagatcgtgagtgccacagggcatcaacagcggcttgcccgtgaaggcatggtcatgaagaatggcgtggctccgtcagaggatgcgataaaatatgaaaggttggtcgtggaactggcttcgggtatcaagatgctggaactgggactgcccgcgcgtctgtccgatgcaagcctgaagacggtggattactggtgtcgggagttcaaggaaaacccgtgtatgatggacgctctcgaaagcgacgtgaacaatgcgcttgatgttatccgaaaagcggaacggggcgagaaaattgagtacgccaccctgcgaaacagacggcagaccacgaccatgcaggaacagatgcccaagcattactttgtggcgaatgaaatccgccagcacccggacaaagcggcgaaaagcatcgtcctcgtcatagaccgggaggcaaaatcggcagatgtcattttgccggcaggagcttcgaccgaggcgaacaacgagattcccggcatgaacaagggacgtatcgaacgggcattgcagaaagaggctattgagcaggtgcgtttctataatactgacggtgcattgggctacagacccgatgacagctatttcaatgaaaaaatggtgacactggcccggttaagaaactacacgttggaaaagctctccacgctggacgtgtcggaggcggtcagacgggcgaatgaggtcgggttcgatgccgtgcagatgattcaggacgacaagaaccgttgggcactctatatcaagccggaaaacaaggaggggtacagcgtctatcccgataaggaggatgtgaaccgttttttctccacgctcaagcaggcgatggacaacatcgacaaggtacggatggagctggcgcacaagtattatgcactggcggaggtcaagcccgacctgaaagtggatttgttcggcagcgatacgccggagattgacctgaaccgtattcagcatgttgccatcttcaagaccaggcaggatggaatccagtgtgtggcaaccatcgacggacaaaagctgcagccccgcagcgtcactccacagcagtggcaacggatgtgggtggcggaagaccgggacggctacaagcggcatttggcggccacgctgtttgccgatgtgctgcaaaagggacaatccgtcggggaacagaaagcggaagagcaggtacagcaacagaatgagacggtggcggaaaatcggtcggaagagacgaatgatgaaaatatgtctccgaaacggcagttttgggacaacctcaaggaaaagcatcccgacgccctgtatctgattcgtgcaggagaagtgtaccggctttataatgaggatgcggcaaagggagctgatatattggggattacgatgaagaaatatccggaacgtggattttcgactttcgcagagttcccaaggacgcaactggacagctatctgcccaaacttgtccgtgccggtgagcgtatcgccatcagtgagatagagctacaggataaacggcaggacgagcaggaaacacataggggtattcatagataaggagtgacgattatgatcaagaatcaagaatatgcacaacagtacgcggagtatgcgatggaacagatgcgaaggtatggcattccggcttccgtcacattggcgcaaggcatactggaaagcagcaacggacagagccgtctggcgaggaacgagaacaaccatttcggcatcaaggcgacaccctcgtggattgccggaggcggcaaatacggaatctacaccgatgataagccgaatgaaaagttctgcagttatgacagcgtgggtgattcatacgagcatcactcccgctttttgaaggagaacagccgctatgccggttgcttcaaactctccccggacgattacaagggctgggcacaaagcattgagaaagccggttacgccacaggcggcaagtatgccgagaacctgcaaaaaatcattgagcagaacggcttgcagcagtatgacaggcaggtgatgcaggagatggcggcacaaggcaggcagttcggggtggaacacaatccgctccagacttccgagagtgcggaacatggaacggggtattcgttcccggtggaacgggaggaatttctgttcattacctctccgttcggaacacggcaagacccgttggacggcacaaagcaacagatgcacaagggcgtggatatacgttgcaaaggcgatgcggtactggctacggagaacggcggtaaggtcgtggcggtaaaccagaacaagaatacgcccagcggcaagtcgctgacggtggaatatgcccggacggacggcagcaaggtacaatgtatctatatgcacctcaaggagatttccgtcaaggtcggcgatacggtacaggccggcggacggcttggcacatcaggcaatacgggaacacggacgactggggaacatctgcatttcggtgtgaagaatatctatgccgacgggacgaaacgggatatagaccctgcggcgtatctggctgaaatcgcacagaaaggacatatcaaattgcaaatgctgcacaacgggaatgacctgctcgccaaatacaaggcggcggaagataccgtgcctgaaaagaacctttcgccagacggatggatgaaaaaactcctttcgtcggaggatagcggtgtgggaatgtcgggatgcaacgacccgattgtggagatggcgatgaccgctttcgcctccctgatgctgctggccacacagattgacaaccggaacgaagaggaacagaaggcgatgatatccgccgcgatggatcttcgtaccatcgacctgaagccgttgttgccgaatatgaagaactgcgacctgactatcggcgagaacggcaaggccattctgaaagcggacaacggggaactgcgtgtctcgcgggagttgaccgcttccgagctgaaccggttgtctgccacgttgaacaacggtacactcacggaagaggccaaacagatacgtgtaaccggtatgctgaatacggttatcctgtcggaagcagcctcacagaatttcgagcaagggatgtcccggcaacagggacaaacggaaaacctgcgaagataaaggcatggtgatatgataaaatgcgtgatgatacagctatgcaagtgtctggcgggagtttccctccttgcgttgcacctccggttctgctacctactgttgggatggatcgggacgctcgttgtcgtgggcgtgcaattagccatcgccggatggatggtctgggcgatgatacgcgcacccgactgaccgcaccctacaacagttcaacatcaatcaacccatgtatcacttgtccggatgatccatgtatcattaaagacaaaaaacagatgattaaatgtaatgttacggtatgcggcgttatcggccgcgatgcgtcggttcgcaagaacaaagaagagaaagaatttctggtgtttccgctccgggtacagattccggcgacgggtggcgggtacactatcgaggtggatgtccgcaaggagggctgtcaggaggaagccgccggttatcggaacggctcccgtgtagaagtgaggggtacgatgtatctcaaacgccggggcgacaagctatatttcaacctgttcgccgatgaaatctgcaatgccgctacggatgatgcggattgcgtcaagggcgagctggtgtttcgtggtaaggtcggccagaacatcgaggaaaaaagggataagaaagaccagccttatacggtgttctcggcgtttagcgcagagaaggtcgatgacggcttcgagtaccagtgggtgcgcttcttctgtttcggtaaggagcgcgaagcgtggttgcagccgggtgtaaaggtggatgccaaaggtgaaatgaacctgtcggcacacaacgggaaaatcaacctttcctgcaaggtggaggaactgacgcaatatgtggcggattcgtctaactataatcaataagggttatggccggttacagaaagaagaatgccgacggaccgaacagcgaggacaaggctcttgacctgttcgccgaaatgatgatcgagaaaatcgagggcattcaaaaggactggaaaaagccttggtttacggagggtacgctacagtggccccgcaaccttcacgggcgcgagtacaacgggatgaatgcttttatgctgcttttgcactgcgagaaagaagggtacaagattccccgtttctgcacgttcgattgtgttcagaagctcaataagcccggaaaggatggagaggaactgccgcgtgtctccgtgcttcgtggtgaaaaatcctttccggtcatgctcaccacgttcacttgtatccataaggagactaaggagaaaatcaagtatgacgattacaagaaactctccgatgacgaaaaggaacaatacaatgtctatccgaagatgcaggtgttccgggtcttcaatgtcgcgcagactaacttgcaggaagcgagaccggagctgtggcaaaaactggagcgagaaaattcgcgtccggcaatcgaggagggcgagcatttcagttttgccccagtcgatacgatgataagggataacctgtggatttgtccgattacgccgaaatatcagaatgacgcctactattccatcacgaagaacgaaatcatcgtacccgaaaaggagcagttcaaatcgggagaatcgttctacgggacactgttccacgagatgacgcactccaccggagcggaaaacgtacttgacaggttcaagccgacaactttcggttctcctgaatatgcccgtgaggaactggtggcagagttaggcagcgcactggtcgcacagcgttacggcatgaccaagcatatcaaggaggacagttgcgcatacctcaaaggatggctcgatgagctgaaggaatcgccgcaattcatcaagacaacgcttttggacgtgaaaagggcaacctcgataattacccagaaggtggataagatagcgcaagaactggaacaaaatgtcggcgagaagcaggaaaacggagcggcagcaaaggagaagacattttattcttctgttgcgtatctccaattttcggatgacacgagacagcttgacgaacttagggacaaaggcgattatgagggattgctgacgcttgccaaggagtattacgatggcaacggaatcaacgaaaaatatacttatccgtcggctacgaacaacaagggtgacagccttattgtcgatgacaagaatttcgctgtcgtgtataacgggagtgtcgggggtacttatgaggtgatgttgaaattcacggagcaggaaatccgagaccatatccggcgttacggtgtcgatattgccggagatacaataaaaggggttgccagggagatggcggcggaacagttctccgctttggcgtatcaaaagattccggccttcgagatgccgaacggtgaagtgctatatgtcgaatataacaaggaatccgatacgcttgatgtcgggcaacccaccaatgccgggctggtcgcgcagcatcgtttcccttacgaccacaatgtcgggctggatgccaatctgcaaaccgtgaacgagaagctgaacgagctggaagagtatcgggcagaactacaagaggcagaatacggcagcggtatgcgccggtaaggatggaaagaaaaagatgcggaactggttggctccgcatcttttttgcagtttatttccccaacaaaccgtctatcatagactgtaaatttgctatgtcgcaatactggttacatccccctcggtagtcctttccattttgagctgtccgtatcagaaacgaatcgagttcaattcttacgccgctgcccattcgtgacagaccggaagagtggctgatgtaaacgaacttgccgttgcgctcaatgaagcaggaggtgtcataatgcccttttgaattggaagccacctttgcaccaacggctgcggcatatttggaaatctcacgcaccaatgctgtctggaaactgcggtactcttttgaaacatagtctcctgcatctgcaagtatagcgtcctgccatttggtataaaaattctgtgccatattgatatttattattattcgttccgcaaataacttttccatttctcgccgtcaatggtcagtttgcccatttcccaatcgtattccacttccggtatattggtataagggaaatgaacggtgtagcctatctgtccgtaagagcaatgcagaggggtaacgcaaatctcccaaccgaagtaagattgcggcgtgcagtattttcgccagttgaaacgacctgcggcaatattgccgcaaagtcgtttgagtatgtcgtttgttgtcattctgtacctcctttgctgagtatggtgagttgttcgggacggtctggaaaccaataagcatcactgtcgatatatacgcatctatagccattccaaggttttctgaaagctaatacttctttggggccaaataccaccccgtagtcgtttgtaaacgccaccatatcgcctacagccaaatcactgtctgtttccatgacttcggacaaccggctgaaaaactccatgccctcggcttcacgctctttcttccagcgcataaactcctctttgtggcttcttgatgagccaataggtaataactccgatgccaaaacctctgtctcggaagagcttgttgagattaagatgatgctgtcactatccactttttcgggagttgagataattcgacattctatatcattatcggcagtgtgccaaaaaaggaggttgccttgcttgatgaaatcgtacttgctcattgtcttttgatttattgttttttttatttcccttttcttgaagccttttgacttcgcccaaaggggttgttttcatgtgcgtcacaaacgggggatgcaagaacgatgagcaaggaacctgcaatgaaattttatgaaataccgtcatctccgattacggaaagttgtcgtcaaattttatttcaggtagcgatagcggtacttgggcaatgttcgtccaccgtacctttgcacacgaaaacagacctgcggcgtatgtcggggctgtgaagggattatacccttaaaacaggaatataccggctgtgaaaccggtggcggaagctctgcagagcatatttataaaagtaaccggggagcctgtgcaaaaaagagagcaaccacccacttttgaggcgggtggttgccaatgtttcggacaaacatcagaagtggtaatcaacaactcctccgatgtagagtatcgttcccggttcaagcctacaaacaaactccataaacgtaaaggactgttcggcaaaagactggcagccatcgccatccaaatagaaatgataggcgacatccaacggattttccactgcctgtttgagataataggtcgaaccccattccaacatattatctgccgtaagagcattcgctctttttttgatattggcgacatactcctctttccattgctctattccaccattatagcgcatggtgtcatcggatataagctcgaacattcctttgggcaaggcatgattgaccaaattggcaatatcctctttacggtcttcctcgtctatttctgaacaatagtcatagaagctcccgtctccttgctggagtgtgtcctcattcagatagttttctttgtctatcggctccgttgaaatttgaaaaatcctgctgtgcataattgtaaattttagattgttaaatattttcttttttcccttttcttgaaactcttttggcttctcgtcggggaatgatttttatgcaggactgacagcgggaaaaggacggataaggcaagtaaacagtgtacgggatgaaacggaatacccaaccgccaaatgtaagagcacagtcaggctcgtccgactatgccctgcaacgaggtggggagtgaaagtcaatcttcgatttgtggaaggctgccgtgaagaatatccgggaaccgttagtgaaagcgatacttgacgaccagacgcacgctgtacctttgcatataaaatctctccgaagagaattgccgacgtgagatgaaaagagaccataattgagaaacgctattattcataaggggaaaagactattcgtggttgttataaatgcttgactaacatgaaaatacaattcgcgccataaaataatcctttcttgaaataaaaatcacagaaaaagaaacaagattaaaaaataaccattaactttgcaccagtcaagtttccaatcgaagcgtcgaacggaattaaaagggaatcccggtgaaaatccggagctgtactcgcagctgtaagtcctattaaagtttatcgcactctttgccactggtgaaagctgggaaggcgcgataagcgggatgagccagaagacctgcttgatgagatagatttagtgaccacgggataattggcattagattaaaatgaacagaggctcgtccacaggcacctatattctttttgataaccgatttctcattcgttgcaaatctgtcgcaataaaaacgaatgtgtgtttaaactttttgtttaacttttaataattaagttatgaaaaagaattttagattcttggcaatggctgttgtagcaatggccgccgcagtgttcacgggatgttcatccgacgatgacttccttgctccgtatgaggagagtgcgattcaaacccgcgcgataagttctaccaatgcgcttatcgattttgataacgtaccttccagcgtaatggcttctgaccagtatggaaacaatctctattctgccacggccaacggtaagcaggtaacgaccggctacatcactcaaatcgggcaaaccggtacgtacattcagttcccgattaactatttggaacaagaatgggtaagcggacagccttgggaatatgaattttggaatggtggttttgccatctctaatttccataatctgacacagggggattatcaaaaccaatgtagcgtgtactggcccaacggcggtcatagcggtaaaaattttgctgtagctttcggttatagcgattcatacaatgattcacaagcaacctatgacaaatgtgcgaagatttacctgaccgatgcaaccggctacagagtcgttaccacaaacactcctgtcaagggtacaccgaaatatggtaaattcaacagcgtatgggtttgcaatacgacttatacctacatagtcatgaaggatggaaactcgtttacacaaggctctttgtcggcacaaaaaggatggtttaaggtggtatttgttgcgttggatgcgacgggtaaacctacaggtaaggaagtagaatactatttggcaaacttcgattccagtaaagatgcagaatcaggtttgaccaataaaatccgtactggatggaatcaagtggatttaagcggtttaggtgacagcgtatgtactgtagctatcaatttcgaaggaagcgattcaagcgcatacggattgaacactcctgcttacgttgctatagacgatattgatgtaaccgtaaacgaataacatgaatttggggcaaatgctttttaacggcaagtgcaaagtatttgcccctttttattatatcccaatgaagattgaaatcaaatactttcttcaagggaatttcagcgttaaaattataaatataatgaagaagtatttgcttttattctccttgacgatatttctatttgcttgcaacaaagacgaagaaatatcgcaggacgtgatattgcctcctgtcattgagttggatagcgaggacggaatctacgttgtaaagataggaaaagaggtcgttattgagccgacctatcagaatgtcgattacgccgtttattcatggaaatgcaacggtcgtatcatttccgatgagcctcaattgaaatacattttcaacgaatgcggttcgtattacgttaccctgcgtgtggatacgagggatgccagcacagaggaagaaattcgtgtggatgtcaatgaattggctccgcccgtcatttcattggtaaccccctctatagggcttaaagttgtcgcaggacgtgaatacatccttactcccgacattcaaaatgcagaaggagccacttatttgtggactcttaacggaaacgaagtcggaacggaaaatacttatacattcaagcaagatgagttgggaacttatgaactgaccttaaccgtaacaaatgaagacggacaatcagagaagacagtttctattgaggttgtcgataaacttccaattgaaatcgtagttccgtcatctttatatttcaccgaggataataccaaatacgtagaattaggacgtactttgtttgtccgcccctttgtgtcaataagtgccgagccttcttatcaatggagtttggacgggcaaccgattgaaggagccaattctttggtttacggtttcaaaccttctaaaatcggagagcatacgcttacttttaccgtgaaatacgataatcaaagaacaaaagcaatcctcactcgtaatattgctgtttccggtgtcgatgaagtcagtgtcaatattccggtgaaatgttgtgaagcggccgggaaaagaccttttgctgccggaaattccatttacagcaataaagtatatgaatttgttccggctccgggacaatttgtaaacgaaacgaatacagcaggtttcaatggggaaagcacgcacgaagcagcctgtgcttacgcacaaaaacgtcttgataatgaacaatatgtttctctcggaggttggggaggatatattgtagtaggattcgaccacagtatcgaaaacaaaggcggttatgatttttccatcaaaggaaatgcctttgattcgtcaaatgaaccgggcattgtatgggtaatgcaagatgtcaatggagacggcttgcccaacgatgaatggtatgaactgaagggttctgaatatggaaaacccgaaaccattcaggactatgccgtaacttatttccgtcccggtcccaacatggatactcaatggcaggacaacaagggaaataaaggggcaattgaccgtctcggcaactatcacccgcaagagttttattatcctttgtggattgaagaggattcctatacgttatacggcacatgcctgaaagcacgtaccgaacaaagcccgtcgacaggcatgtggtccaataatccgttcgggtggggatatgccgataatattggtgatgatatgcccaataaagacaatcctaacgcgggagcacttggaaactattttaagatttccgatgcgctcaatatcgacggcacgtctgcaaacctttcccatatcgactttatcaaggtgcagaccggagtcaatgtaaaagccggatggttaggggaaaattccacggaagttttcaagttctgtgatgaaaacaacaataacgacaaataaaattcattatgaacaaaatatatcatttcatcctattctgtttcgctacgctctgccttgctgcatgtagtgatgacgaccctgaagtaagcggaatagacggcaaggatcacttcatctccgagtttgctctaactgtagatggcattacctatcaagccatgatagtcggggacaagattacaattgagataccttataatgccagtctgaaaggggctaccgtagagtatgccctttgcgagggagcctctattaacccgaatccatcgaccattgaggattgggagaatgaatggaaattcgtagttacctccaaaatgcaggatagcaaagtatattcctatacttatcaatatgcagacatcgaacagagcggcagcgtggtacttgccacgcaatccgaggtggataattttgccaagacaggaataaacaaaatcgaaggcagcctgaccatcggaacggcagacggagaagaaatcaccaatctggacggacttgccaacctgaaacaaatcagtaactctcttgttatcaatccgtcttacaaaggagcggatttgacggggttggataatctggaacaactcggaagtttcaaattaggatcgacaacttctaccagtaaaaacataacgctcaaaacggttaatctgccctctttgcttggagtgaccggcgattttgtcgttaacagttctgtcattgaaaaaatatctatacccaaagtcgagttcattggtgaggatatgtatataacttccgatgctttacttgatttggatgcaaatgccgttgaatctgtcggagcttccttaattgtcaaaggttcggtagcgcaaaaagaatcagcgacaaccgaagccattgttttctcagcactaaaacagatcgggaatgaacttacaatccaatattttcccaaactgcaaggaatttatctaccggcattggaaagcgtggtcggtactgcttcattctccgatatgtcctccatcggaagtcttgcaatgaccgaattacattcggttggaggactgactataaaaaattgcaaagagatttccattgttgaacttcccggtcttatttcctgcggagagaccagtgtggatgcgaatacagtcaataagctaaatttagcttctttgaaagatgtattcggagatatgactttaagtaatctgctcatagaagagctggatttgtcccagacaaattttaacgggaatacacttaccctacaatgtgcccaactaaataaaatagtaggaccggaaacatttaacggtagccttcttctatgtcctacaaattgtcgattgactgaattcacgttggaaggaatctcaaatatacagggtgacttccaatgcataaattatttttatgtaaaagaatttgttatgccatttattcgtgtggcaggagatatgactattgcattgaattcgggaagtgttaatacgggggcggagatcgaatttcctaaattgcaggaaattggagggaccttaacattaggaacaaataggaatgcaaataatattaccttcccgttattgaaaaaaattctcggttcatgttcagttacgacttacaaacttaagaatgatattgagtttaccaatctggaaagcattggaacggatggagctgatgcacaaattaagtttgagattgaggctactaatattctatgtcccaaattaaaaacgataaatgggaagtttgatattgcaacatcttcttttatgtttgatatggaagtaaataaagtatcttatcctaacgtagaatcaatatccgaaaatctttcaataacatgcccgtattctgattttggttctaatggtattttgtccattgatttttcaggtctcaaatcagcaaaagggattagtataagcgggcaaggagatgttactgatttcagttctttcaaatacctgtttgaaaacaatgttctaacaggagaatctcaatggtctgtcaaagaatgtggttacaaccccactttccaagagatgaaagacgggaagtacaagcttgccgaatagataacgaaacaataaattttctgccaatcctcggtatgcttaccgtaaggtaagctgccggggattaactataaaaataacggtatgacctatcaccaattgaaatatctgctatggagcgtagttgtcggagtgacactatccttgacatcctgcatgaagtgggactacggcgatgccgtggaagatttcaacgccacgggagccggactgttcatcaccaacgagggcaacttccagtacggcaacgctaccttgtcctattacgatccggcgaccaaacaggtgcagaacgaaattttcttccgtgccaacggcatgaaactcggcgacgtggcacagtcgatgaccatctacgacaacaagggctgggtcgtggtgaacaactcccacgtgattttcgccatcgacctgaacaccttcaaggaggtaggacgcatcgagaacctgacctcaccgcgctacatccatttcctaagcgacgaaaaagcatacgtcacccaattgtgggacaaccgcatcttcatcatcaacccgaagaaatacgaaattaccggctatattcaagtgccggacatgacgatggaaagcggctcgacggagcaaatggtgcagtacggcaaatacgtctattgcaactgctggagttaccagaaccgcatcatcaaaatcgacaccgaaaccgatcaagtagtcgatgaactgaaggtcggcatacaaccaacatcgctggtcatggacaagtacaacaaaatgtggacggtgaccgacggcggttatgagggcagcccctacggttacgaagccccgtcgctctaccgcatcgatgccgagaccttcaccgtggagaagcagttcaagttcaagttgggcgactggccctcggaggtgcagctcaatggcgacagggacaaactctactggatcaacaaggccatttggagcatggacgtgacagccagccatgtgccggtacgtccgttcctcgaatacagcggcacgatttattacggactgacggtaaaccccgccaacggagaagtgtacatcgccgatgccatcgattaccagcagcagggcatgatataccgctactcgcccgaagggaaattgatagatgaattttatgtcgggattatccccggtgcattttgttggaaatgaagaataaattgcggcatatataccatattattttcatcacgaaaagacaggagatgacgattccaatgacaaccaaaggaatgattctcgatcagatggtacaaattttcacaaggaaaggctgtcatgtctatgcctgcaatgcttttctcaatcatgttcatatacttgtagagataccatctcccacggacttcgcaaagattatcaataaagtaaaaagttctacaggcgttgtctatcgaaaatattcggaatatgcggatttttcaggatgggcagccggatttgattcgtttagcgtgtcattcaatgatctgaatagggtaaaacaccacattgagaaacaagagacggttcatcaggaactttcattcgaggacgaatacgaccaactgcttgaagaaaacggattcaatgcctatcaagattttatgcgggcatcattctctgcatatgctgcggtaaataaccatattaaaaacaaaaggaaatgacatatacaaaatatttacttttctcaatattggttgtctgtccatccgtgctgtccgcgcagggaatcacccggcgtattcaccagatagacgaggtgaccgtatggggcaaacggccgatgaaggaaatcggcgtgcagaagacgaagttcgattcactcgcactgaaagaaaatatcgccctctcgatggcggacatcctgacgttcaactcgtccgtgtttgtcaagagctacggccgcgccacgctctcgaccgtcgccttccgaggcacgtcgcccagccatacgcaggtgacgtggaacgggatgcgcatcaacaaccccatgctcggcatgaccgacttctccaccattccgtcctacttcatcgaccaggcatcgctgctgcacggtacttcatcggtgaacgaaacgggcggtggactgggcggtctggtcaaactcggcacggctcctgaagtcgctgaagggttcaacgcccagtacgtgcagggcatcggctcgttcaagaccttcgatgagttcgcccgcttcacctacggaagtgagcggtggcacgtctccacccgtgcggtctattcttcctcgcctaacgattacaagtacaccaaccacgacaaaaagataaacatctacgacgaggataagaacatcgtcggacagtatcacccgaaagagcgcaaccgctccggggcgttcaaggacctgcatttgcttcaggaagtgtattacaataccgggaaaggcgaccgtttcgggctgaacgcctggtatatcaattccaatcgggaactcccgatgctgaccaccgattacggcgatgccaccgacttcgagaaccgccagcgagaacagacgttccgcagcgtcttgtcctgggatcacatgaaaagcaactggaaactcggcgtgaaaggcggttacatacacacatggatggcctacgactacaagcgtgaggtcgcacctgacaactgggcgtcgatgacccgctcccgcagcaaggtaaacacgttttacggtcaggcggagggagagtattctttggataaaaaatggtttttcaccgccaatgtatcggcacaccagcatttggtacggagcgaggacaagaacatcatcttgcaggacggtggcaaggccatcgtgggctatgacaaggggcgcgtggaactctccggctccgtatccgccaagtggcagccgatagaccgcttgggtatgtcggtggtactgcgagaagagatgtatggttccgattggattccactcattccggctttcttcattgacggtatcatttccccgaaaggaaatgtgatgctgaaagcatccatatcgcgtaactaccgtttcccaactctgaacgacctatactttttgccgggaggtaatcccaacctgaaaaacgaacaaggtttcagttatgatgccggggtgagttttgatgtcggcaagaaaggcatttacaagttgagcggcggtgcgaactggttcgactcctacatcgacgactggattatctggctgcccaccaccaagggcttcttctcgccccgcaacgtaaagaaggtccacgcctacggcgtcgaggtcaaagcgaacttcgccgtgcagccggcgaaagattggctcatcgacttgaacgggtcctattcgtggacaccctccatcaatgaaggtgagaagatgtcgcctgctgaccagtcagtgggcaagcagttaccctacgtaccgaagcactccgcatcgctgaccggacggttgtcgtggcggacttgggcgttcctttacaaatgggcgttctactcggaacgttacaccatgtcgagcaacgactatacgctgacaggacacctgcccgagtatttcatgagcaatgtctcgttggagaaaaacctgtttttcaaaccggtggacgtgcagttgaaattcgccgtcaacaacctcttcaacgaggactacctttcggtactctcgcgccccatgcccggcatcaacttcgaattcttcatcggcattaccccgaagttcgggaaaaacaagaaaaagtccgaaaatacaaatatgtaacgatatgaaagcattaaagaatttaagcctgctgttgctacttgtactggcattcacaggctgccacaataaaagttcaaaactcgccgatttcaaccgaacggtctatacacctgaatacgcttcggggtttgacataaaaggtgcagacggcaaaaagagcgtattggttatcgtcacgaacccttggcagggcgccgacagcatcattacgaacctgttcattgcccgtgatgacgaagaggttccggcggatttcaccggtcaggtgctcaaggggaatgccggacgcatcgtctgcatgtcctcgacccatatcgccatgcttgacgcaatcggtgaaacgggatgcgtagtcggcgtgtcaggcatcgactacatctccaatcccgacattcaggtacggcgggacagcatcggagatgtgggctacgaagggaatatcaactacgaattgttgctctcgctcgaccctgacctcgtgctgctctacggcgtgaacggggcaagctcgatggaaagcaagctcaaagaactggatattccgttcatgtatgtcggcgattacctcgaagagtctccgctgggcaaagccgaatggctggtggcactttcggaggtcatcggaaaacgggcggagggagagaaagtgtttgccgatattccggttcgctataacgctttgaaaaaacgagtaaccgatgcagccctcgatgcctcttcagtgatgctcaacacgccttacggcgacagctggttcatgccctcgaccgaaagctatgtcgcccggttaatcaaagatgccggaggcgattacatctacaagaagaacacaggaaacgcttccgcacccatcgacctcgaagaggcgtatctgctggcgtcgcaagccgatatgtggctgcatgtggggatggcgaacacgcttgatgaactgaaagccgcatgcccgaagttcatcgacacccgctgtttccgtagtggacaggtctataacaacaatgcccgcaccaatgctgctggcggcaacgactactatgagtcggcagtcgtaaatcccgacctcgtgttgcgagacctcgtgaagatattccaccccgaactggtcgaggaagatttcgtctattacaagcaactaaaatagatgcgctcccgttccgccatattgtttgccacgctggccgccctcacccttttcctgtttctgttggatttggcggtgggggcagtcgccgtaccgctcggcgatgtatgggcggccctgacgggtggcgattgtccgcgagcgacggcgaaaatcatactgaatatccgactgattaaggcggtggtcgcgttgctggccggagccgccctgtcggtcagcggtcttcagatgcagaccctcttccgcaatccccttgccgggccttacgtgctcggcatcagttcgggcgcgagcctcggcgtggcactcgtcgtgcttgcaggcgtcggttcgtcgataggcattgccggggcggcttggctcggagcggcgctcgtgctggtcgtcatcgccgccgtcggccaccgcatcaaggacatcatggtgattctgattctcggcatgatgttctcgtcgggagtcggcgcgattgtacagatattgcaatatctcagcaaggaagaatccctgaaagcctttgtcatttggacgatggggtcgctcggcgacgtgaccttcgaccagcttgcgatgctcatcccgtcgattatcgccggactgttgttggcagtggtgacgatcaagccactcaacttactgctgttcggcgaggaatatgccgtgacgatggggctgaacatccgacgctcgcgagggttgctgtttctctccacgacgctgctggccggcacagtgaccgccttctgcggtccgataggcttcatcggtctggccatgccccacgtcacgaggatgctgttccgcaacagtgaccatcgggtactcgtaccgggaaccgttctttcgggtgcggcggtgctgcttctttgcgacctcgtttctaaaatgttcaccctgccgatcaacgccatcaccgcattgctgggaatccccatcgtggtgtgggtggtcttgcgcaataaatccgtcacggcatgatagagttacacgatttttccataggctacggagagcacaccttgctctgcgaggtggaaaccaccatagaaaagggcaaactgacagcccttatcgggcgcaatggcacgggcaaatcgacactgctccgagccatcgccggactgaaccgccgttataccggccgaatcctgctcgacgggcataacgccgccgatatgcgagcagcagaaatggccagaacgctggcattcgtcacgaccgagcgcacacgcatcgccaatctcaaatgcaaggatgtcgtggctatcggccgcgcaccctataccaactggatcggaaagatgcaggaagccgacaaggagattgtcatgcggtcgctcgcctcggtgggcatggaggcttatgcggagcgtacgatggacaagatgtcggacggcgaatgccagcgcatcatgatcgcacgggcgttggcgcaggatacgtcgattatcctgctcgacgaacccacctcgtttctcgacatgcccaatcgctacgaattgtgtacgcttctggcacggctggcgcacgacgaagggaagtgcatcctgttctccacgcacgaactggatatagctctgtcgcttgccgatgcgatagcccttatcgacccaccccgtctgtcgtgcctgccgaccgaagagatgcgtcggagcggttgtatcgaacggttgttccgaaataatagcgtggcgttcgatactgcgacaggattcattaaagtgggacaatgactaaggaatatatcatagagaatttcacagcaaatatcagcgtggacgaatacatttcacgcttccgggacgaaaaacgttttgtcgaattttgcaaacaatgccccaactacggcaatagttggggatgccctccgtttgatttcgataccggagaatttctgcgccaatatgaatatgcccacctgatggccacgaaaataattccggtcgaaaaaaatattccgatagacagaacgcaggaattgattaaaccggaacggctcaggatagaaaggaaattgctggaaatggagcacagatacggaggtcgggcattcgcctatgtaggaaaatgcctatactgtcccgattccgaatgcgcccgcaaatgcaaccgtccttgcctgcatccggacaaagtacgtccctcgcttgaagcattcgggttcgatatgacacgaacactctcggaacttttcgggatagaactgctttggggaaagaatggtattctaccggaatatcttgtgattgtaagcggattatttcataactcgacagaaaatattatcagcgaagcgtaatcaggattcaggaatataatcttattactctcattgataacgtcatgacagccattcacaaaaaagtccctgcaatccggattatagattgagggacttgatgaaagttaatgtaaaaactaaaaaaataactccactttcgtatgcctgttggcttcgaccggcacatggtcggctatgccgcccctgcttgtcttgacgatgcgttcgatcggtatgccacgcttctccaattccgtaacaatataatcagttcttgatgcacttaatgaaccattaagcacgggagttccagtcgaactgtcggctgcgccggttactctcaaggataatccgtatttcttggccacgcgagccagttcatcaaggttaagcatttgggaagcatccgtcaggtgcgccgtattgaggttaaaaaagaaatagacaggcgacccgatgcaatttccggcttgtatgagttccgtcctttcagagacgattatacccggcttttcagcatcatctccgttgttgccatatccaatatttgccgaatcaagcggcgagattccatcccagtgccggtttcttaatcttgcccggagtgagttcagcccactataattattcatgggataaccttggcggctgtcggtctcatcgtcatcaacgagatggccatacttgtcaagcaaaccttctatttccagaattttcttcaattctgcgagcgcccgtcggttgtggtcgtgccagtctttataacgcttgttttctccggacaagacatcggcataatccacgagccactcattctgacgaatgtaaggcgtagcatccactgcacgtttccaaccgacctttccgaaatggaacgtgaatccggcggtcaacgatagcatgtggtcgccgaggcggttcgggcgtccgtaaccatcgaagtcctgaaaggtggtcgtgccggagagttccaatatggcacttacccgttgggaaatccgatattctccctgtacgccatacgaaacagcaaaagggttattcccgttagaggcgttgtgcaacaggccgacacctgcaaagggagcaagattccagcgtacctgttcttgccgggcatatctgcggccaaggacattccacagcagatccgcatggacatggtggtagtcctgattggacaatgtgccatctttgaactgcacaccgctgtaattgatacgtgcgccgacggacggagtgaaccattttccgactgcgaaactgtacgagggtttcaagcgtccgaagaggtcttcgcagccgagaggtgtgccgagaaaggcggacgtacccccggtaatgctgacaaaccagttgccagtccgggttgccggaagtaccactccatcaagatagacgggctgtatcggttgcagttcctccgagacattatagtacggtgtatgttgtacagtatccacctgtacgggttgtacacttgcctgtgcctgcaacgtgcaaagcacggccaatataataaagatttgtttcgtcatattccaatgatataattcgttatacttttgatttgtagtaaggcgtatgccacttaccgtttgggtttcttgccaatggccggacgcatcatgcggctcgccatcctcatgcagcggagtgcccatgcacggttgtcctcgtccttgtcgcgcccccatttcaggtcgctgccgccacctccgccgccacgagtttcggcaaaagtggtggcattatcgaccataccgagaaacagcatcgtcgcgcagtgcatcacgtccgtaccttgttccgctatggactggacgagcgagccgtcgaacagttgccgttccgccacgtccatctgtgccgatacgttcctatactcgccgaccacattttccagcaggacatccttgagcaacgtgtccactttggaatgtacatcatgggagtatttgtaggcttcctccttgagttccccggtacgttcctcaatggcatccatgttctctttcagctcggcaagctgacggtcagccgtctgtaacttctcctgcttatctgccagttgcctgttgattccggccagttctttttccagacttttcacttgtgcggctaattgttccgcatcgcccttgttcgctttcaaatcctgttcggctgccgatagtaggacctctttttcggctttcgacttctcaaggttatcgaccattgtcgtaagccccttgaccctgcgctctgccagacggatgtccgattggaggtcagccaaaactttttgatgacggctgatattttcctcgatggtcgtacattcttccgacaacatacggcggtattcttcggtcgtcctgtgccgtgctcctgtttcggatatgcttgttcccctcgacattccccaccttgtattgacttcggcgaaaaagtcggtatgaagctgtttcatccttgcgctgtattcaaacttgtccttaccggcaaatatttccttgtacgcaaagcgaccgtctttgattggcaggagcgtacagtggacgtgcgggttcaattcgtcaaggtgtacgatgaatgcggcgatgttctgttcaccatatttgccactcacaaatgaataaacatccttcgcccatcgttcgatatcgctttcccttttgatatgggtattgtccgcatctttctcgaaatccactttctgcgtgccgaatgcgagttcgtgcatccgttcacgggagccgccgaaaatgaagttcaccaccgtgcggtacttcggttctgccagtccttcgttggggtctttgattccacgcctctccaatatgtccgccatccgttcgggaatgctgcggcttgtatcaatggggcgcaccttgcctccgggcgcaatctcgaagttcaggtgtttgcgtgtgggatcgtaattccccttatccatagcatacttttccgccttttcactgcgattgcgcaaatgttcgttgctttgcgcggtggtaatacctttcgacacccgaatatcaagtacctgtttttgatctgccatactcttttcgtgttgtttggacaatccgtcctgtcccagcttgctgcttgcccggacagcctcccgacggtcgatagacggtcggggtattaggctcccccttccctttgtttcgtggcagacgggcaagcccgtgtgcctcctataaccggcaggataaccgttaagggatggaggtggattgttcgcgttatacaatctgttttcgactcccggttcaatccaccatcgcctgtgcctttgccagaagcgataaaaaaggtttgcgaagcgatttgaggcgttcttggtcttcgtccatgtcgaagtccgtcactgatgcctcggtgtcgagaatcagcccggcgaggtctttggcggactcgatgaaagcagcccattcttcaccgaggtcaaaccggaagaaatccacaagcggcgaactgtcatcgaatctcgacttgtgcaggattttttgcagggcggcgtgggcgatgcagcacaaggctgtttcacgatgttccgtgaccaaagtgccggaatgtgcggaggtcgtgttggaatgggtgtccgaacagagtccggtgtcacggtcggcaatttcagtctttgccagacttacgagttgtccacatattacgccagtttcggcagcggtcgttttgccgattacccaatcggacaatacctcacggagctgtccggcaaaatccggctgctcctgtgcattgcggggctgtgctgcctgaccggattgtacggtcatggtaatgaccacgcttttgggaagctggatacgggtcagcaagccgaatgcctccattgcactcaaaaaagaacggacggtagccctgtgccaatgccactccgatgcgaggtcggaaacggtcaggtggcactggttgggttgcagcacgtagtccttctttcttaaaaacggagaaacgaaacctgccagtgatttgtccaacaggtcacagtacgcttcggtgcgtgtcttgcgatcgtcccccttttccttgaggtagtcgaatacctccctgtctgccaatatggaaacaggtatcttttggttatttttcattttcattcggttttaatgattcatattgtgcggatatatcagtgttgccgctgtccgcttcatgcggcagatttgcgtgatgattgtcgtgataggattctgacagcattccgagatgctttgcccatccggaaagtgtgtccgtatccttgcattcggacatgacccgaacggagggatagaacagggctgccagaagaagataggcaatggttatcgccaaggtgtacagatgcggcacaaagccgatgaccagtgcgcccgatgcgagtgtgacaaatgcacgggggcggtcaagcaacctgcgtaaccagttgtccgtccgtcggaacgaaaacattgcggcacagacaccggtagagagtaggattccaaactcacccatatgtccacaggcatatacataatggaaaagaagcaggcatatcagccatacttgcacatacagtttacgggcgttgccgcttcgtgccattgccacgtaaaaggttgccatgaaccgcttgttgttcttgtacaataatattgataccccgaaaggtatcgcgcagaaaatgagtagcaggatattcagtaacataagtaatagggcttttcgggtataggagtgggacgcacaatgagttccaactggacaacgccgtatgtcgccagccggataagggtttcggcatccttgggcgaaaagtacatggccgctttcttgatgcgctgcttgaatgtactgtcttgctttcggtagatggccaaagccttgtccagttcgtgttcgggaatagtccatgtcgtaccctcggcgtgtatgccgttcgtcttgaaggcacgcagtaccaatgtacgggaaacgaggtagtcggtgcggtcggttcttgagatgatatgctccttgtagagattgtcatcggcaacctctatccacgtccggtaggcattgatgcaatagaccatctgtcggtataaggtgtttctcatataaaattcatcagcacgtcggacttgtctttcttgtatttcaggaacccgcttttggagtgtagttccaagtcgaggcataagtccccgtacatctgctccaaagaatcatagatggtgacaaggatgctgtttacattgccctccgtatccgtcttggcgttcatcttgaacatctgtccgaaagcgggattcgagtatgcacaagtgctgtgaccgaatttttccgtccgcatcggaatatggtggtagagcgtgatcaactccatgtcgtcctcgaacatatccattacttcgtccagttcgtaaggggtgcgcaacggaaacgtaagcagcacatagtcgccgtagaactgcggttcttccatcgtcgtcacatcgagcaactgcggaagttgcagggggacgaatgccatgaagtcattataaaaatgtcgtaacatattcatatctttttctgttgttatattttacagcgtgtgtatgaatgcctccatcagcattccgggcagctcgtccaagcggttgtctccggggtgcagcatcctgcccaactccctgaaagcgtcgggtgtctgcgaggcaagcatatcgagttgctctctttcttcggctgaaagcaacgccaggcagaaaccgtccaacgacgaataaggctggagaagcatccagatgtaagcttgtgcctgtgccggtgtcttgacttttttattgcagatgtcgtcgatacaggttcggatattctgaatcagcctgcggttggtgcgcatggccagataaatcatggcattgcgataggtgatgtcgttccgttcggcggcaaggaatatctgtgcacagcatcgttccgtgtcatgagtgatgtcggaaagattctcgccgtcgaaatcaggcagacgtgaaaggaatgcccggtacacggcatcctccttttcgataaaggtcgtcaggtctgccatacaatgaataccgtaatcaatcgtttcagcaagggtagttcgataagtggcaagaatgtgttgtcggtttctctgactgacgggccggttatccaatgaggcaaagaacggtcggattgtttcagccgcacgatgcaactctttgtcttcaagatgcggtgagatttgttcttttacccacagtatatccttataagtgcgtgtttgagacagcaccatccgtgaaaattccatgcggatggaatcatgtatctgttcacactcttctcttacagtggaatgaagccggccaagcgtatcacattcgagatgcaggaatacggaatccctcaatgtttgccattgcttgaggtgtccggccaattctttaatggagagttttttctgcctgcgtatgtcggacaggtattccctgtatgttccggcagggtcattcttggctttcgccaatcgtttgccattgccgttgtcgcatgacgcgcataggaatatggcaatcgaaacggcaattattttggcaaagattatcggctgttttaagttcgattttaatgttttcatactatatcatttcgtactatttagtgcaaaactatatattatttttgatacttcgcatccgaaaaaccgtattttgtgcattttttaatatcgtacttaatagtatgattaccaatgaaaacaagtgaagataaaacacggggaaatgtacgattttcgttttttaatatagtatgattcatatactcgaataaaacttgtatatttgcacttgttatcatgaatattgtatattgatatggcaaaagtcggttatatattcgaggctaattcctacgatgcgtttgatgcggataaggaatggatgcgccaatatgggtgtgtacaggtggttgaagaatcggtcggacacgagacgcttaggccgagatggaaacaactgatgtcgaatcttgaaagaggagacgaattggtgatgtcaaaattcagcaatgccgttcgtggtttacgggaactatcggcattgattgagctatgccgcatcaaggtcgtgcgtattatctccattcacgataaaattgacaccgacaacaaattgtttccggacacgacaccggcggaagtattggccatgttcggggcattaccggaggaagtggctgttttgcggaagtcgtcggataaaattatacgcctgcagcagagtatcagtattccgatttccaaaaaaagtatgagtaaaactgaacgggacaaaaaaatcgtggatatgtataacaatgggtattcaatccgtgatatttggaaagaaagcggtgtccaaagtaaaagcaccgtgtacagcattctcaataaatacaaggttcagcttaaccgaacaccgggacgagtgccgggcatccggaaatagaacttataaatcaatatggatattgaaaatcaatagattgcttgcgtaattcatcgttttttcgtatctttaagttggatataactatataaaaacaagacctatgggagatattataattttattgctggtgttcttggtagtgggcaggcttttgaggggcgtgttcggaggattcagcaaaagcagttttcgggatgacaaataactccggattgttgtaactggcagatatttgttaattttgcaccgtattcataaaaatcaagaacaatatgacaaaagcggaaattgtcgctcagatctcacggcagagcggaatagagaaaacggtggtgatgactgtgatagaatcattcatggaaaatgtaaaagagtcgatggttgcgggaaacgaggtgttcttgcgcgggttcggtagctttatcatcaaacggagagctgaaaagacggcccggaacatttcgaagaatacgacaattaaaattcccgctcacaatatccctgcattcaaacctgccaaagcatttctgaatgcggtaaaagagaacaagtagagtataaaagtacagatggtgcaacaacaccgtaatgagtaaaacaaaagcgacccgaaggccgcttttgtcgtgataaggcaaggattatttcttgccttttttcgctggtttggccggcttttcaggagtttcctccttctcgacgggcggatagaacttgacggcgaccatcacgatacggttgtgtttcacaccgctttggtcgctccattcttcgggcttgaaatacccctcgacggtcagcatcgtacccttggtcagttggtcgaacgacccggtgttctcgtttttacgccacgcctcaaaattcataaaggcggaaacgcgtttggattcctcgccattattctccaatcggcttactgccagagggaaacgtgctacacttgcgttggtgaactgacggatttctgcatcctttcctacgaaaccggttactacgaaattgttttcaatctttttcataatgaattgtttttagaagttattaaatcaattttacgctgcctcaaaaagtaggtgcagttaaggggatgcaccaaggccggacgcatcaatactctttatttttgtccgtaggcaaaaccggaaggctcgataaaggaagattgtacggctgcgccattggtcaagacttccaaagtcgttcccgtctgcatactatctttgcatcggaaaatgatgatgacttcggcggaaaactattctgaaaatgagcggaaaaccgtagttgcaggggaagtgaaagtgcaatccgtccaccggcacaatggtgcgcgtttcggctgtaagtccgcagaatcggcaggtattttcgtgtaattcggtcggactgaattgaggtggctacaaacagaacactgaactgacaacaggttgcggtaccgcagaagggaatatcaacgaagtggcgacaaaaggcggaacggggtatcggggtactgccatgttcccgtccggcagaaagaaaaggggacaaaagggaaaaaggaaagaaccctgcttttcggaaaagcggacggagcttttcacgaatggctgttttttacaaaaggatatggcgcagccaaaagagagagatagatgtaaaaaagggaatgcggcgtggcaggaatggaagattatcccgttcctgcctgcctgtatcatcaaaattctgccatgattacccgatgctcgaaaatctttttttgattactgggacgtctttggcaaacccataggtgatgcttgccatagccgaagacgaaataatcatcaaggcgtgttttttcttgtaggcgttccatgccggtacgcagttccgcttcatcggttgagaaaagaatcgtgttgatgatacggaagtagagttctgttacctcgtcacaataaggacaaaagctatgctcaatcgttgctttcatgtttctttgattttaattctacttctacttctacttctacttctacttctacttctacttctactatgtcttctattcgaccatacaggacagagcgcaacgctgttttgtcaatggcgtaatactcggcgatatgtccgtgctgttttacgaaatatcgtttgagaacatcggagaaatcaaagaagtagcccatcaatgcgatacctcttttgaaatggatgcactctttcacgtttcgggtaatccagttcttgtcttcacggctcaacttgtctccgttatcaagttgttcccgtaactggtaaaccctgctgtctttcagcttctctaattcgggtacgtcccattggacgaatttcattgctatctgctgcatcgctcttgtatttaatcgtaaataatcacttcatcacgatactcgaccacctctttgccactactaagacgcaccactattttattgccgaagtcgccgacaactgttccctcagagtagcctttatagggggtaagcaaggtgcagtgcgcacctataatttcgctattttcttcgtattcgtacataagtcatgtcattttacggttacaacttgatatcccatttcccctgtgagaagattctgaagctcacgtattcgtctgtaaattcgtaggacagaattttgatataagttttgtttttggcttccaacgaagctatcagtctgtcgatttcttcttccggataaacccaacgagaggtaaactccgcatccacgctatcgctgtgtctattgacaaagccgtcgaaagtgtcatccaagaatgcctctatcttgtcgaggtccgctttgttttccgtccttgcgtagaaaatgtttgttgcatagtttgccataatcctaagttttaagttttttattttccctcttttagcatttcagctactttcgggcttgattgaaaattatgtcgcctcaaaaggtgttatggctctttatgcagggtttcacgaccaaatacgacctctgcaaagcggagcgtggagattttgtcgggaaccgtcaggctgtgaccttgaatacaagaaagacatgacaagtacctttgcgacacaattctcatcaggcagaccgaaagttgggatgcgaggataaaatgcctatggcagaagttacgataaaaggaacttccgtaaaattgggatgcagcgaaaaaagaaaatatcggtgcgattatcttctcttttgactgtgaatataaaagtaagggggagaacttcggtaaaggtttagtttagtctattagcttatatatatgctaaactaaagtaaactaaatataggcagatatattggactgcctgtataggtgttttgagggaaatggttacctttgcaaaaaacaatgttccttgaaagaaacagagatttgtccttttttcttttggctgtggttattcatccatagatgactgcaacaatcactcttggcgagaggatgaaaatcgtgtgaaaagacttggaaaaatactcaaagtacgaacaagtgaagagaaagaaaggtagtgcaaacaaaaaaacaagaaaatacgataattcgtgtttctgttcctaatttgtttcttgataaaaacacatcacaatataaactattaatttacaagatattacgatgtgaaattttgagatataactaaatttaccagattttcgctcgaaacgccttgcggtcttatgtctatatcatcggcgaaaagttacccgatcgcctgctattttctgaaatacaattgcaaagttaatcaattattgccatttacagccatactccggtcagttttcttcattcaatccatactctaccaatttattatacagcgttgtcctgccgatacccagtatctttgcagccattttcttgttaccggctgcttgtttcaaagcacgcaggatacgtcctctttcttcatccccgctcttcaatgtaaaacaagcggaagtagcggacggttcattgtcaagttccaaatcggcttcggttatcatatcgccttctgattgcaggactgccgtctgtatcttctgtttcaactcgcgcacgttgcccggccacgcatgggcgagcagggcattacgggcagatgcggcaaacccttttacttcacgttccaactcacggtttgccatttcacggaagaactcggccaatggcatgatgtcttccgggcagtcgcgcaagggcggcatggttatcacatactcctgcaagcgatagagcaaatcctgccggaaccgcttttccgttacggctttctgcaaatcctcgttggttgcagccactatcctcacgttggctgttttgtcctcctttgcaccgacgggacggtaacggcgttcctgtatggcgcggagcagcatctgttgcatctccattgttaggttgcccacttcgtcaaggaacagcgtgccgccatccgcttccagaaaataccccgtcttgtttgcttcggcaccagtaaacgcacccttgacgtgtccgaagaaggcggattgtatcaatgacggggacaaggctccgcagtccactgccacaaaaggtttatcggcaagtttgctttgttggtgtatatgttgtgcgatatgttccttgcccgtaccgttctcgcccagtatcagcacgctcatccgggtggtggctacaaggcgcacacgtttcttgattttctgataggcttcgccctgccggacgaatatcggaatgttccattgtagtcgcttttcatgttctttttgcagggtgcggataagcggtatcagtttatcctccaacaactgtttctgtatgtaatcctttgagccgagcttcatactttccactgccgtatgcacctccccgtaattggtcataacgataaacacctgctgtttgtcgttggcacgcatccaccgtaacaactctatgctttcaccgtcggggaggcgtaggtcggcaacgacaatatcatccacctctgactttgccaatagtttcttggcagtggcaagattatatgccgacatagtatcgaagctgtctttcttcagcaggttgcagacataatcgttatagacggggttgtcctcaatcacaaatactttcatccgacaacctcctttccttttgcgcaagttctatgataactgttcccatacgaagcatggcatccacgcatttccgcaattccatttcggaacattcagattcttgatgcagcagttcatacaggttccacaagggtttgtcagcacggataacagcccatgaacttcgctgacggtgcatccattcgtccaacgccttgcggtcattcctctccatgatttcccggacagcctgcatatccttttctgtttcggttatcaaacggtcgagcatcgcccgtttgtcaccatatgcaagcagagaggacaagtcgggaagttcatccttgtccgtacttgtcaaaaggcatttgtctgatacagcaaccagttcggaaatggaaaatggcttgaacaggcaggcggtaaatccattttccaacagctcctcttcgctgcaactgccggaggcggtcgccacgacaatgggaatctctttcgagttgctgacacttgacgagcgtaacaactccaacacctcatagccgttaatctccggcattttcatatcggttatcatgaggtcgtatgtgtgctgccgcatggcttccattgcatcgccaatagtggtgaacgtgtcgcaatgcacacctataccagcatacatttcctttgtcatggataataccatcggattgtcgtccaatacgatgacagaataaggtctttctatatgagccagactttctgcggctgtctgttcttcaataccaatatcggcagtgttcattggcaactccacagtaaaacgactgccttctcctttttcgctttccaagcgtatagtgccgccaagcatcccgactatctgtttcacaatgcttaaccccaatccgaaaccgtcttgcgtggcggcgttggaaagccgctcgaacgctccgaacactcgctgttgttcttccgcactcatgccggttccggtgtcctctactacaagggtcagcctattgccgtcatagcttatgacaagtgaaacgcttccggcattcgtgaacttgacggcattgcccagcaggttgtcgcatatctgtatgatgcgctccttgtcgccattcaggataataccctccgggcactcgatggtaagtttaagatcttttgcttctgcttgttgcgtaaactccgtttgcaacagctccgcgatgttttccaaacgaaacggacggacattcgcctgttccttgccgctgtccaagcggaagaagtcaagcagggagttgagcatgtcggtcattctcttggaggcttgcaggatattgtccgcataaccgcttatcttttcttcttcgttgtcctgcatcagttccgcatatccatgtatggcagtcagtggtgtgcgtagctcgtgggtgatggtgtgcatcgctttcttgcgtgaggctatcaacgattcgttttgttttacggacttttgcagttgcccgattaaatctgttgtcttatgtttgtactgcttgatgcgagtggcatagcggtgaatgatgatgtatgaaataatgagcaacagcagcatgacacccgttatgatacctacctgcaagaacgacttttcacgcatagcggatatttccgcctcacgttcctgcaagtcagcctgcaccttgtggtccatctgctggataagggtttgcagttggcggttcagttccgcattgcggctggcaaggctgtcggcatactccgacagacgatggctctgggcacgttgttgcgctatcatatcacggttcagtgtgtagagcatcgtggtggtcgtcgtcggaggtgcttcctgtttcttgccgaacaacccgagaaaacctttcctcctctgtttcttcggctcttcctgcctgctcgtttgcactatcaccggcacctgcttggctatccgacggttgatgtccgcctgttgttccagagcctccatgatggcgcacagccgcttttccttgtcctccagcaagtggcgcacgctgtctatgcgcaccgattcgtaatggctcttgaagcggcaaagcatactatccaccgtcatccgttgccgccggtatgccgccacatccttatcgtcccattccagcaccgactcgcccaaaagagacaactccaccacacccacatacgcatcgtgtgtttccttgcggaagcggttgatttcacggttctcccgttccagcaactccaagtcgcgccattcgccgagccacgtgcagatgatgccgcccaccagcaggactataagcagatagcctgcggcaagcagcttgcggaaatgcttggtagtggtaacgaattgttcgctcatttgctgtttgtgtaaataccgttattcaacatacgcatataggtcgtggaacttcgcaggttcatggatgagaatggcggccatgctaccgatgaccgccataagtatggcatagccgaaaaatattttatatcgcagcgacactgtttgttgatgaaaaatataattggttaactaaaactccaatttgcgttatttgcatttgttccttcaaaaagtctggtcagattttgtatctgatgattctgtaatgtatcttgtgcacagtttacggcgtactgcaaactaacgtcccttatctgaactatcattgcttaatgtatcttgtgcacagtttacggcgtactgcaaaccattcataatatcagagaatgaattggtttgaacactgtccggctcatcgtcattatttttcttgcctctgtgaaaaagtcccatgttttttatttaattacttgatttgttgcctttaatgagcaccaatcttgacaatgtccggcttacagcttccatatttacactggagtctatattattattattgacaatgccttgatgccaaaaccaatatggtggattctccgtgtgttccatcacgtcctccttttttattggggttatacttcggttaatgttcgttgcgggcggaacatttccgtccgcaacggcttactgcttcctcaaggtaggcaatgctcctttaagttcgtaacgccactttgagcctgcgttctgcaaggcggtgttcatggcatcaacggctttctgccaggtaacgacaaagccgtccaccttcgtggctccggtgctttccctattgtagccgatgccttgttcatgattgtttttccaatagcaggcggtcacggtggtgtagttatttcccaaaaagccgccgatatgtactttgccagtgctactacccgtactggttacgttgcccgtggcatagcaggcaaggaggctgcttcctgcgttcattcccaccagactgccgccagcgatattctttgcggggtttatttctatggtcacgttgcccgtggcatagcaagcggtcagggtggcactcgaattcgtctgacctgccacgccgccgacatcgaccgttcccttcactgtggccgaggaactgcatccggtgatggaaccgcctatttgagcacccaccacaccgccgacatacaccgtgccgctgacgctgcccgacaccgagcagttttcaatggtgccccagctatatcctaccacgccgccaatactgccgccatatatttgattgcttgttatctgtacgccctccatcaccacgttcttcaccgtaccagctctattgagccagccgaacagacccgcatattcgtcatttgtcgtaaaggtcagccccgtaatggtatggccgccaccgtcgaaggtgcctttgtatgagttgtcgtagtctgtgcctatcggtgtccagtctttgcctgtgaggtcaatgtctgtgtcgagggtaatgttaatgtcgctcttacctccgttcactaatttggctatattcatcaggccgtcggcggaggtcacggtgtagctgccgtcgctctctatggtatagcccaggtcttttgccgcagcgagggagacggtgtaggtatattcaccgcccgcctgccagtcggtagcattcttcatcttataaacgaagaccttgccgttggtgaaggtgcaggtgataaaggtcgtgccagcttccacactttgcggggctacgagggcgatgtaggtgttgctgcccttgtcatacggggtgattttatctggattgtcattctcggtggagagacccgtcagctgcacggatgccagcccctcggtgtagtccgtcagaacgacggtcactcgcgccgtgcggtgggtgaagcggagcgtggggctaccgtaggtcaccgtctgtccgtcagctacgatgaggtcactgccatcaaagtctttctgggtactttggttggcttttacctttaccgcaggtggggttgtctcgccagcggtgtagggccaccacgctgtgacggtgatgtcgttgtggttggtccagtagtacgggtcggtggaggtcagcgtggcgctggtgagatcgacggtggagggcgtcacgttgtacgtcttcaccgtgccgtccatcagaactgccacgctctgcacacccgtccaattgccatccgctggggcacgggtgccggcggtggctgtcgcggcggggttcagccccgtggcggtgaagacgatgggtgtgccttccgccccttcagacaggaagcctgcttcgtcctgcgtgcaggcggcgagggcgaacagcagggcgagggctgcgaatatatggatgtttgttcgtttcatgatgcgtgttgtttaggggtttttattgtttcttttcagtacgggcagaccgccggtgccgagtgtccactggtagtcgttgccggtgagggcggtgttcatgccgtcgacggctgtctgccatttcacggtcgcgccgtctaccttcgtggcaactaccgttcctccttcattacggagtactccttgctcggcattgcctccccaataacaggaagttatattcttgtagttgaaacgcactatagttccacagccagcctcatctttcaatgtgccgttgaaccagcaagcgatgatatcgccataatttgcattggctataccaccactatgtacagtaagttttcccgtcacagagcaggcaatgatttggccatgatttcggtccaccattccagcagctcctccactactgccatccagattcacatctatgagttgtaggttctttatcactccactttgatttaaaaaaagaaaaagtccaaacctcgctgctgaaaagtttaatcccgtaatgctgtgtccctgcccattaaagacgccggagtagcctggccatgtgtctaaacgtgtccattccctacccgtcaggtcgatgtcggcggtgagggtgcaatttatcgattcatctttttgtatggctttgttccatgccagtaggccgttggcgttatagaccgtgtaggtcttggtgttgctgtcgtagatgtagcccaaatcctcagcctcgccgctctcgccgccgccgtcaacccagctgccgatggtgcaaccctctaacgtcaggccggtggcgttcaccttaacggtatatttatagcggctgcccgcttctaatacgacgttgttctgcggacggaagtagaaggtgccgtcgccgagttccaccttgacgaacggtttgcctgccgcaacggtctgcggggcggtcagtgcctcgtaggtgttgccgcttgcgttgtaagtcttgatggcagtcggattgccgttatcggcggacaggctcacgaggctcaccgtggcaccggcgacgctcgtgaatcccgtgccgggcttcagttcgattgtcacgcgtgccgtgcggtgggtaaattcaagagtcgggttgttaaattccaccttccggttctcagcagagatgaaatcgctgttctggaagtcagccagtttgctttggtcttctgccaccttcacggcaggcatcttggtgatgtcggcattattgaagggccaccatgccgatacggtaatcgggtcgcggctggtccagtagtacggaacgttctcgcgtgaaagcgtggcactcttgaaatcggtagaagccgttacggtgtattcctttaccgcatcgcccatcttgagtgccacggaagtgacgccctgccagtcgccgtccacagaggcacgggtggaaggggctgccagcggcgttgcttctacggacaatccggtggcacggatgacgacggggtattcaccttcgggcagacggttatcgccagcaagttcgtcctgcgtgcaggcggcgagggcgaacagcagtgcggtggctgcggggataaataatctatgtctcataattcttcattctaatcgattaattattaacatcctacaggtcagcacccacatctccaccgtctatatcgttccactttgcaatggtggcttcgctgacttcaaggactttgttgcgtaccttgacggtataggtatagttgttgcccgccagcagtgcgccatcgggcatggtgagtgtggcatgatattcctgacctttgtaattcacaaccaacggcagtgatgcaactgtctgcgggaagaggatgatcgatgacgtgagattgccgtctgccagattcatggtcagttctccggtctgtagtccgttgtctgcggtggcaataccgtcggccgtgttgaacgtaccggtgagtaacaatccgtctagcgtgtaacgttcaggcttgaccacgctgaaattcacgccgtcgcccgcctcgaaggtaagggttatctggctcatgcggtggtggaaggagttgtcttcaccgcctttggcggttttgtcggtgaagcttactaccgggttgtttttgtctcccgtggctcctgaagcaaagaggaagtcgatggcaggcaggttttgctgcgccgtggcatcggtcgtggctgtgaggatgcctcccgccgcgttgtacggatagtaggcgcggaaagtatgggtctttgcatcttcgatatagataacctttccttctgcctcaaatttcccgtttttcaggatgaaaggcacgttgccgtactgggaatcgttgccgatgtcggtgatgccgatacggtcgccggcagtccaggtggttccgctggcgcgggtggcgggggcgatgttggcggtaaactgggcggccacgggggcgccgttcaggttctcgttgtcgttgttgcaggctaccagtgtgagggcaagcgctgcaagtgcaaaaaatcttgtcttcattatatctataattttattatttacaaatcagcatttacatcatcacctttcacttcttcccagccgttgatttcggctccgtccacttccatgccttcgggagtctcaaccagcgttccgctgagggtcagcgattcgccctttccggtgttgaactccttgagggcttccgtaaggtcgcttttcagcgtggtgggggtcgggttgccgtcagcatagcggatttcacccttcagcagttgttccgtaccggtcacacccagcagccgcaccgtggctttccacttgccggcatcgtcaccttcggtaatcttggtgaagggcagcacgacgttcgaagcggctccgtaggtatcggtagcgaagtcgagtgttccggctgcacccgtcagatgggcaacaatctccgtgatgcgtctggcggcatcaccagtaggttcgacgacaagcgtcaattcgcgtacctgctgcttcattgcggcggtcagcggatagtccttgtctttctcgatgctcacctgtttcgtataggtgaagaaccatcccggggcattgttcacaaaggcatccgtgcctgcccggtttcccgtggctgcggcaatggtggcggtggtaccatttaccgtgattccttcagttgggttccacaccgcaagggtgtagctgcccggagcaaacagatggtcgggggcatgggtggcggaagtctccgtacccgtatagtcgcccatggtgaccgtccatgtggcaggtatgtcgataccctcaccgcgggccgaccagtcggctgtcaccgcaatcttcccgtagtcgggatgcggcgtgtcataaagcgtgtccttcacgcaggaagagagcagcacggcggctgccattcccatcatatttatatattgtcttgctttcatattctattcctccgtgttagaataacttccataccaatgtcacaccggcattgatggggccccaccaatcttttgtttcgttgccgcggcgtacacgtacaccgtcgatgacttcatatttttcgaaatcggcattcaggtagcccaaaccgaggttgaaatcaagagccagtgccttgttcagcctcagctgatagccagcggtgatgccgccacccatcaggtcgccctgcttgcctgtttcggagagcttgtagttgaactgtccggccttgaacatcgcgcccagataccaggctttcttctcacccatatagtaacgtacttccggagccacttcccagagtgcatagcggtggtccttgtcgctccacgtccatgaagtccacgagccgtttacggcaatgccccacgatgggcagatgcgccattccacgccaaggtcgggtgtcagggtagcccagcgcagcaggttggcacgcagggagagatgataatcagttgtgattttggtttctgacggcgtgtcggcaagtgtattttgttgagcggctttctcagcttctgccttttcagcggcaagtcgggcttcttccgctttacgttgctcttcggcaagccgttcctgctcggcacgcttctcggctgccagtcgttcggcttccgccttgcgtcgtgcttccgcttccgcatccgtcacggctgtttcctttaccagtaccgtcaggcgcacgattacaaaatcaccccctgtcgcatgattgtgggtaatgaagttttcttccttgattttcgcgcgtgtaatcagttctgattttactcgattggcacggatcttcgctgttgcaaggttctcggcttcaccgcccagcgaattgcagtagccgtcaaccaatagcggcagcttgccgtcaagaattgtggttttgttgttttcgatacattccaacaggcgggcaagttccgtgtcgttgccattccaaggcacgtagaacatgtccttctgcggaacaaagcggaaggtgtaggtcgtgtctgctttctgctgcgcaatgacaggaaaagttaccgtcatcagccacagaaacagggtaagaaaagtgatttttctgctcatataaacttgaatttattatctttgtcttctccaaaggtaataaatgccattcagcgcccaaaatattacaaaaactttttctgttgaaatacagcgttttatgaaaaatagtcgtttgagcacttttcaaattgtcgttagagcacctttttgtcgaattagcactttttttgtcgtttgagcactttttgaaaatgggtttctgagacctctttcaatgttttttagtatacaaattattcccgatttgcttttttccatttggcaggcgtacatccttccttctcggaaaataatttgataaagttactgcgggaaagaaaaccggaagactcagccagcttctgtatattgatttccggatgttccttcagtatgtttttcgcatactccaaccggagaccggttatccattcgcggaatgtcattttatacgtagtcttgatataagcggaaagataggtacggttcgtatgaagtatttcggacagttcttttatggtaagtccctgctggacatagccgtctgtctttatccagttggccactttctctataatttctgtataggacactggaacttctttctcagaaactatttcagtttctgtatctgtcagaagttcttcttcagactgtatatcttgctcaaaagcattttccacctgttcatagaacagcaggtagttctgatagctgtagaaaagatagctgtagaacggtattgacgacaaaatccagataaaaacatatttgtctggcagaaatgtcagcaatccgcatccgacaccgaagataacagcccaataagtgaatatggaaagccattcgatatatgtacctatatcatccgcctgagtttcattgaaaatccgaatggctctacggtatgcaattatgactctgcgagctaaaacgactccaaaaacgactaaccatacagctaaagcaaataaagagaatttttgcatgattccgcttggcaacaggaacaacacaactccggaaagagttgaaaatataatccataaaatgatatgtgtccacacacgccgtttggtaatgtaaaaacgatcaagcaacattatcaatgccgaactgaacagagaatagcacaggaagtatgtggacatgttcatcaatatggaagaatccgcatttttgaatcggataccaaagaagaaatgtaccgaataatttgccgaaagcagcagcatagctatacccataatctgtcgggagcggagataattcttgaaaattttcttttcaggagtctttgcaaacaaaaaataaaagccgaagaataacatcaacggcagtgcggtataaagtgaaaaactgtatatagatatagatggctccattgttatgcttatttgattttgatacaaagttacgtctttttcttcacaaatagacacataatctatgatttaacgttatagattcggtcatattagattgaaaaattattagaattaaagccagtggtgaaaaattcaaccactggctttttctgtcaagacttcgatattaaagttttacacctttggattccgataaaccgggtctccctataattaaatgactgcgtacaaagtccacgtgcgggctttccggctgttgttccgtctgttttttctcgttgccttgccggttctcttccgtgttttcctgagccggagccagctcaagctgtatcttgcggtccagtgcggcgagttcggacttcagctgtttcagctcgtcctccttcttccacaccttgcccgctatctcctgcaactgcggaatctccttttccagcacttcgttcttagacttgtactggtcgatgatggtcggaatcctctccaatgcgttcagaaagtttcgtgcggcagcaatcgggtctgccatcgccagatgcccgttgttgtaggtgtacttgtagttgccctccaccacgaagcggttgtcggtgaactccagaccttctttgagtgtcctctcgctgaccacctttatcggaaagccgtaaagttccccgacagccttgtacagtccaccagtcatggcgttcttggcgatttcctgcaaacgcttaccgatgaccttctcatccgttgaatccacgccgtccaccttgacaagattaagacgactgccttccctatcagtctgcacaacggaaagaaaacggttccagtcttccgtcatggcttcgatgaaagccgtgttgttgcgcagttctcccgtcttggattccagcttgaactccgaatcgcgcttgcccttgttgaacgacttgcgttccccttcgagcgaggcgatacgcttctctaatttcgccttatccaaaaggtcggtattgccggagagcaacgccatatactccgagaagttcatacccgatttttcgtccattgctccctcgtcgatggtacgtgcgcccatcgctccacttttgagctgcgatatgaacgtctgcttgcagtgcagcagattgaacttgtagctgtccagcgacttttccaccgcgtagatgatgacatccacgttattctcggcaaaatgcttggcaatctcgttcccggctctaacaccccgtccgtcacgctgttgcaggtcggacggtcgccacggtgtatcaaggtgatggatggcgacacatcttttctgcgcattcacgcccgttccgagcatacttgtggagccgaacagcacgcgcaccgtcccggcgttcatggcatctatcaccgccttacgagccttatccgtcttacactcctgaatgaagcgcacctcacttgccggtatgccgtaatcctccaccaacttgcgttttatctcgctgtacacgttccatccttcccccggctgatatgtccccaagtcggagaacacgaactgcgtacccttgtgcgcctcgtacttgtggtaatactctgcaatcatcttggcacaatggcttgccttgttgtcgggatggtcctcgtagttcgggtctatcatgcgcatatcaagagccatctttctcgcatagtcggtggcgatgagcatcttcgccttttcctccgtttccgacaggggtaacctgccaagcagagtggcatcgccggttttggcaaactgcatcagcttctgtatgaagtcctcctgctccggtgtgggcggtatgtggtgcagtctctcattcttgtttggtctgtccacacctacatcctccgccgtgcggtagtcggtaatctcgttgtagaaggcggcaagctccggcaccttgatgaaatagcgaaaacgctccttctgaacgatattgttcgttacgttgaactcaaaatcggtcgtctttttggcgaagatggcagcccaagcatcgaaacagcggatgtcctgccgttccagttcgttggggcgcaggtatttgaagagcaggtacagttccgtcagactgttggaaatggtcgtgcccgaaaggaacgtagcccccaagtccttgcccgtgcgttcctgtatggtacggatggcaaagagcatattcagggccttctggcttccttccgagtttcccaatcccgccacacggtcatgacgggtgttgaaagtcaagttcttgaactggtgactctcgtcaatgaagatgtggtcgatgcccatctgcttgaagtccaccacatcatccgtgcgggacttgatagcgtgttccaccttctccagcttcgccacaaggttatgcttgcgcttctccagccctttcagcatcgcccgcgacacgttcttgccctgctgccgcaagacttcgaggttttcctccaccgtgtcaagctccgcctgcaggatgcgctgctgcaactccggtgactgcggtatcttgccgaactggtcgtgcgacatgatgacgcaatcgtaatcgttatttttgatgttgttgaaaaaacgcacgcggttggcggtcgagaaatccttttcagaagcgtagagaatcctcgcattgggatatgccgcctgataggtggcggcaatctccgccacattcgctttcagcccgataatcatcggcttgtgcgccaagttcagacgcttcatctcatgtgccgctatgcacattatcagcgtcttgccggttcccacctcgtggtcgcagatcccgccgccgttctgtttcagcatccagacgcaatccttctgcgacgggtaaacgctcttgattccccggcttgccagccctttcaggttgaggtcgggaaaagtctggtgcgagccgtcatacttcgggcgcacgaaacagttgaacttgcggttatacatcgtcgtgagccgttccttgaactgcggcgactgttcttccagccattcggagaacccgttacggatttcgtctatcttcgcgttggcgagctgtatgccctcgctgtcgcgtaccttgatgtcgttgccgttctcgtccttgccgatacttttcatcatgtcggggcaggtgttgtgcagggcgtgcttcaacaggtgcataccgtcatagttccggtaatagccctttactaaaaactcgtccgtgatcttcatggtgcggtagccgcacgccacggaaaactcgtccatgcttgcggagtaggctattttcacgtccgtgtcgaaaaggtggctcatgtaggcggcatacacgcccgtgggaatccagcgttccccgaaattgaagtcgaggtcttcaaaggagatgcgctgcggttcggcctccttcaatgcctcccacgcctgtttcacctccggcatccatcatcaccagtttcacgttctgtctggcgttgaggttaccgtaacgcatgacaaactcatcgtagtaggtgttgagatacccgcgctgcggtttgtgttccgtatggttctccgtctcgtggctatacagacgttcgtaagcgtcacggagcgatatatacagcatcgctttctctttttgatagccatgaaggtcgagcggttggaaggtcgcaccgtaaggcgtgaggtctttcaggtaaccgagattgcgtgaagcatccagcaccatcgagccgtcacggtggtgtggctccagcaggccgttgaacggacggggagaaaggtccatgacttcctccttcggcttttccgtttcaagttccgggaacagggaagtggcaaccgtttcggaagtaggcacaacttctgccagtgtttcaggttgctttatttcttccgtttgttccggctttttatccatattgtccgaagaaggcgcaaaagcagggttcaacgtgtctttgatacccatctttttcagttgttcctgcctgtgccgttctgcctcaagccgtagggccttgcgccgttccgctgtcagactcatcattgtctcatagaagccgttgatgggaggattggtttcccaatccagagtggcgtaaatgtcgtccgggtcgtttggcttttcggcattttccggcttttcttccttattaccgtttaccggcttggcggcttcaacgggtggagtaactttgacctgcggtttaggcgtggacggcataggcttcggcttgctttcctttttcgctgcctttttcttttttgccggttcctctatgggcataccccaaaggtcgagcagggtaagctgcacggctgacgaatggttgggttggcgcggctcaatctccggcttttcctctatgggctgtgcctgcggcttctccactcccttgacaggctcaattacagaaacgggggctattacagaaggtgataccttttctgttttcggagcaggttgcacttccgcagccgtgctttcctcctttgtcggatgcaggctgtgtttctcatacagtttcctgtcaagttgttgcagttctattttcagatgctcccgcaagtcttccgccagttgtgcgatgtccccacggtgcaggagtttataggctggtttcccgtatgggtcggtacttctgatcaaatccgtgtgtgaaagcgagccgatgctccatacatacccatttacggaagtgccgataggggtctgttcggtctgcacgaagagtttttcgttgtaatacagttcaccattctttccgctgttcttttgcaggataatcaggtcgctgcccacctccgttcccgcgttatccgtaaagaggttgttcggcaggcgggctacgcccaccagattggcatggttcatcatatactcgcgtatgggcgcgttggtcggggcatccagtaccccctgcgaggtgatgaacgccacgattccgccttcacgcaccgcgtcaaggtttttcaggaaaaagtaattgtgtatcgtccgtgccgccgagtgccttgcaggatccttgctgcccgaaaattccgggtcgaacaccgccacatcgccaaacggtatattggagacagccaaatcaaaatggttcatgaacggcttttctatcttctcgaagccctgtacccttactttctgtccgggatgcaggtgcttcagtatcttgcccgtcatcaggtctttctcaaaagccatgatgtccgcgtccggtctgttctccagcacggcgtccacgaatgcaccgacacctgccgacggctccagcacccggtcgggacggatgccgtgttcatgcagcacgtccgcgatggtcccagttatctccggcggggtatagaaggcggtcagcacggactgcttcatggcatccatataccgtttgtactccgtctcgtcttttgtgttctcccgcagcaacctgtgcagttccacggtaggggcaaacagttcgaggtcggacttcgcccagtggacggcatccgtcagttcccttgcagggttgagtatgctcttcagtcccccgaaaccgcaataacgctctaacaagagccgttcgcgtgcggtgggtgtgcgctgttccctgtcaaggaggaatgccgtccgtatcgcctcgatgttgtcccgcagcctctgtttgcggttaaacgccatactcttcgatatagaggatgacggctcccgtcagctccgtgtagagcaggtcatattcgggcgacagggcgaaattgtcatccgagaggtcatagatggagaatacgtttccgacaagtggcagcagcttctgggtaaaggcttcacatttttcttccggtacttcacccgcaaattcgttctccacgacttcgcgcaggatggcgtgcctggagtagcgaaggccctccgtcagcaccttcatcgccagttcctgcgccccgtcgacaggatatccttcgagccttgcccgttcatacgcttcggcggcacggtcggttctttctcggatgaaggcttcatcggctgcctgttcaaacttgttcgtggtgaggtagtccagcaggtacagaccgtaataggaaaagtcggtccgaccctcgtttttcttcttgttgttcatttctttggaatttagtggattgataatgatgatagggataatcgttggaaaacgagaagaaaaaggcacccggtatccctccgagtgccaccactaaatccaaagtatgagtgtaatccggtatcgaagaacaattcattactctgaaccagtggcaaagttaaacatttattttcttcttttcgcagaggtcgctttacttttcctttctgggaacacgaaaaccgtgttatagtccccgtcaaaggcgactacggcatcaaaactcttgccctgcttgctcttgaatcctttgagcagtttcgtgtgtccgtcggtgagcaggcttttgatttcatcatcagagagggtgcggtttgctttcaggcggaacacgggcaaaccgcactccgcgttgtcgcagcggacgaccttgccgtaaaactgcatcgtccccgctccgcacttgggacacttgcagccggaatccctgcgggcgaacagcttgtcgcacgacagcagttcggaggtaatttcccgtgtatatgcctcaatcttcctgcggaagtcatcggcgggcagttccccacgctcgatgcgtgccaattccttttcccattcgcccgtcatggcgacatcggcaatacgcatcgccttcacgaccgagtaaagggcaagccctttttcggtggggacaagcgacttcttgcagcgttccatatagccgcgcttgaaaagcgtttcgatgatggacgcacgggtggcgggcgtgccgatgccgcaatccttcatagcctgccgcaatgcgtcgtcctctatctccttgccagccgtttccatcgcggacagcagggtggcttcggtatgcagcggcttgggtttggtctttccctccgtgatggaggcggctttcagtgccagcgtgtcgccttcctgccaacagggaatggcggcggtttcctcttggctgttgttctcttctccattctccttgccatagacggcacgccatccggcttgcctgatgatgctgccttttgccacgaactccactccggcacactctgccgtgacggtggcagtgtccttgacgcatttttcggagaaagcctcaagcatgcgcccggctatcatgtgatagacggtgctgtcctctttggagaggaacagcggcttctcgcccgtgacgagcagggcatggtggtctgtcaccttgccgccgtccaggctgcggcgtgtcggcacggctttcggctgcaacttgcccttccattcgggcaggctgccgatgaaggcaagcagcttggggatttccgcgaacacgtcttcgggaatgtagcggcttccggttcgcggataggtgatgagcttcttctcgtagagcttctgcgcgatttcaagcgtctgttccgccgtgaagccatgcttggcgttggcttccttctggagcgtggtcaggtcgtacaggagcggtgtttcctccgtcttctccttgcgttcggctttcgtgacggtggctgtgcctgccgacttcaccttattatacagttccgtcgcggactctttctctttccatttttcggaagaggaaaacttcaccgttccttcatcgcagccgtccgttgcgatatggagctgccagaaggcttcgggggtaaagcggcggttctcccaatagcgtgcgcacaccatcgccaacgtgggtgtctgcacccgcccgacggaatacgtgccgtgtccggcggcgatggagagagcctgcgtgccattgatgcccacgagccagtcggattcgctccgcgctttggcggcgaggtagaggttgtcatacttgctccccgcttcgaggttgcgcagtccatcgcggatggccttgtcggtaagcgagcttatccagaggcgcacgaaaggggtggcgcatcctatgtaatggtagaggtatcggaagataagttcgccctcgcgaccggcatcggtcgccacgatgatctgctcactgtcattgaacaggctggttatggtttttatttgtgccactacgccgctgtcgggtttgtagcccttctcagcctttacctgacggggtatgagcgtgaaggagtcggggatgacgggcaggttgtcacggacaaagccgcgtatgccgtaaccgtcgggcatggcaagctggacgaggtgcccgaatgcccatgtcacggcgtagccgcctccctcgaaagatccttcctctctctttgtcgcgcccacgatacgggcgatctcacgcgccacagacggcttttctgcaatgattgtcttcatatttttttgtcgttttgaattttacaaatgttacttcggatttagtggcggacaccggattacatcttcatgcccttattgtttttcttttgcggcttctcctgctgctgttgctgtgcggtgtccttcggggcggtctgtcccttccgcaacggctccttcaggttcttggtagcctcgttggtcttgccctcgctgttcaccgccacctgcgtgcggctctcgttggaaggcgcgaccttctgcgcgttgtcggggttggtgtcgtagcggtacgggcgtcccttctccgggttgaacctgatgtacatcgtggcgtggaagccctgcttgtcggtcacgttctccagtttcacggctttgccagccacgtagtcggctttctgctgctcggtgaagtccacgccgctccatttgctgatggggcggatgctgccgtcggcgttcgtccacgtgttgcggcgttgctccttgttcgtgttggctgtattttccgtaccctgcgcctgtccctgtgcggggttgttcttggcttcctgtgcttgtgcggcacgtggcgacctgccggttcccggcacgaactccacgccgcgctgctccacgttcacttgcagggtggtgacgaacttcctgccgtccttgcgctcgatgagtttgtcgcgcacaggcagcccggcacgcagcatgtcctgctcctgcttggtgatttccgtcttgccgatgcgctccggtatgcgcaccttgtttgccgggacatctgtgatttcgttcgtcttgcggtcgatgctgacgaacgaggggatgatctcgcccgtttccctgtccacgaggtccacaaccctgccgaggttgcccgtttcgcgcaggttcttccggtcgtcgtcggagaacttgtgttccttgtactcgtcgagtttctgctccttgcggatgaagtgcggcacaaggctgacgttgccctcgccgtccttcttgaaggagaggcgggcatccagctcgaaagcttctccgccgaaattgggcgacaccctcaccaagtcggacttgccgtagttgagcatcctgtcaaggtcgcccgacttttcaaggtcgtcgcgcttcacgccccatttctcctccaactccttccagttgatcttgctctcgtcgatgggttggtagccccggttgctctgcgcctgctgcgggttttcctgattctgttcgtttttctgttccatttcttcctgttttttaggttcgtcatcttgtttctgtcccggttgttcctgcttttcggcggactgctcctcctgtactttcttttcgtagccggaggtgtccaccttgtggggcgcaagcatctccttgttgccctcggggtctttcagcaagtccttgataacttccagcagcttgtcggcttggtccgccgcgacacggtagaaaccgaagcggctgggttccttgcactgccggaagaagtttttgaagaagttgtccagcacgtctccgtgcctgtcgaattgcaggaaactctgcgcgttctccgcctttgcgggggtacgcttgggtgagccgtcggcgttaagcccggctaccacgctaatctcgcccgtcttctcgtcgcggactatcagcacgtctttttctgttgttttctttgccatttgaaaaatgttttaatgggttatttattaaagaaattatggatacgcgccttgtagaaggctatatcttccttgcggaaatcctttacgtgttcggagaggaatgtcagtacgtcctcctcgctgtaataggtctttttgccgagcgtcttgtacggcaatgcaccgatgctgcggtagcgctgcagggtacgcttgcttatctggagcagcatgcagaggtcttggttgtcgaacatcctgatactttccatcgggtttggggctttgccggacggtcgcagggagagcagcagctcgtcctgacggtcgagccgttccatcagcttctgcatccagtcctcaaaattgtttcgtgtaagcagttccatatcttatgtcctccttcctttgggtttgccgccgcccgtgcgcagcgtgtggttgcgtttcagttccgtcagtgtcgctgcatcttctgccacggtgcagtctgcgagcaggcggtctatttccgaccggcggtagcggcatttgccgcgcagcacgatatagccgatgcgctgttcgctgcgcatacgttggagggtacgggtactcacgttcagcaggtgcgccgcctcgcgggtggtgagcagcatgtcggaagactctcccttcctctcaccggaaacggcacgcacatagaccgctatctcggctatctgttccgtcagggcggtgaaggcggaactttcaatcgttatcactttcatattttgtcctttcttttgtttctctgcggcaaaattcggcaataaacaaaaggggctttaacaactcattacgtgactcacgtaagattttctttgaaagtgactccgtaacccggacaaccggcgcaacaagctgccgtatagcggaaaacggcacgcattcaaggcggctgcgttacctttgcggtaaatcattaaatgttttggtatatggaaatcgtatctatcgagaaaaagaccttcgagatgatgctggcgtcattcaacgccctctcggagaaagtcgccgccctcaggcgcaaaagcgacggcgggcggctggaaaggtggctcacgggcgaggatgtctgcgggcagttgagaatcagcccgcgcacgttgcagtcattgcgtgacaggcggcttatcggctactcgcagataaaccgcaggttctattacaggccggaggaggtcaggcggcttattccgcttatcggcacgatctatcccgatggaaaatgactatgtttttattaaccacttaatccgatgttatgatgaacgagaacaacgaggttttctcaatggaggacgagccggttgccaccgcgatacagaatatgctcaaaggctccaaatggctctccgcatttttggaaagttaccgtccgccactggacggggaacattacctgacggacagggaggtggcggaaatgctccgggtaagccgccgcaccttgcaggagtatcgcaacaacaggatgctgccctttatccttctggcaggtaaggtgctttatcccgaatcgggactgcgtgaactgttggaggcgaattacctcaagccgctggaataaggcggttgcatgaaaaaaaaggaaacggacagcacccgatggtgttgtccgtttcctttttcgttgtctgtatgcgtgttcagcaatatccggttttcccgttctgtatgaacatcacgtatgcctgcctcttttcctttgagagtgccttctccaccagccacatgcggaacacgtgtgtatagtaggtgttcagccggaaggctactggaatgatgatttcaagcgagtaaacatccgcgtacaggccgttttcaagctgtatgtagcggcatacctcgtagtcgttcagcacgtccgacttgcggacggctttgatggcggcgttcactgccgggacggtggcatggaactcttcggcgatttccccggcggtcatccatacctcgttaccggttatgctgaccgtcttgtcctctataatgattatgtcacgtttcatggcgtctctgttttagatggtacatcctgcaaattcctcgatttggttcaatcttgcggcaaggttctccatgtcttggttgagcttctctttggttatcttcgcgtatatctgcgttgtctttatactcttgtgtcccagcatggaactgactgtttcgatgggtacaccgttggagaggaacaccgtcgtggctgccgtatggcggctctgatgccacgtgatatgcttggtgatgccgcaacgcttggcgacggcacggatcccggcgaggcacgtgttgtagtggggaacagggaaaatcctgccgttttcgcacagcccgcggtatttgtcgatgatttgtttcgcaatgtcaagcaggcggatgttagacaccacgcccgtcttctggcggttgatgtttatccactcgtgttcatcgaagtaggtgcggatgttctcttccgtcaaattgcgcatatcggcgaatgacaagcccgtgaaggcgcagaacaggtagaggtcgcggtatagttcctgtttggcgttcttcagtttaccttccatcagcaggcggatttcgtctttggtcaggaaactgcgtgtcgtttcctccttcttgatttcatactccctgaacgggtcgcgtgtgagccattcgttgttgatggcgatgaacaccatcgtccgaagtgggcatacatacagccacacggtattggtgcagcagtgtttgtccgtgcgcagaaacatctcgaagtcggaaatgaaagcgggggtaagctctttcaacgcgatgtccttcacgtggtaacggatgttgagaaactcttgcaggtgcttgtaaacggtcttgtacttcaagagtgtgcctttggctttcatgcctgcttccacctgcttggcatagtcctcgttgtgttgctggaacacctgcatcagcgtgtgatagcggtgttccagtccgagaaaggcgttcttcaccttctctgccgtgacgaagttgtcacgctccatgatttcctgatagtgcttgttgatgcgcacccgcatcttgtcaagcatgcggttcgtttcgagtgccgccgtgcttctgcccgtgacacgtccccctttggtgtcccacaacttgggatcgatggtcagtttgcaactgaattgcgtctggctgccgtccaccgtgatgcgtcccatgacgggaaccgtcccgtcttttttcactacctgacgtttgaggtagtaaataactgaaaatgtactcttcatcgtccttaattttttttgttcaaaattagttggtgaagagccctcctctgatacgcaaattgcggaagaacggcgcaatcttttttcgttaccggattttttgcgtgagttgtcagtaactcactaatccttaaagccttgtttcgttattcgtgtccatttcgtcacctattgggcgtggttacgaacaagtaacgtagctccgtcttgatttggcttcggcgtggattgtaatggctctcggaataattggcagcataaatgaaacccctgtaaatcaaatccattaccatattcttccgcatttcacttttttgtagtaactttgcattttaaaaccaagatatatatttatgcctctgcacaataaaaaagatcacatggactgtgtatattatgcgacggatgaaagcgcgttgtttcgacaatatcgtttgtccgatagtacggatatttcggatataaacgaaagtcatagtgtgcttctttatcttgcggaaggttgtctccagattacattgggaaattttacgtcgcgcaccattgaacacggtatgttggtgtttctgccgaaaaatataggcttcaccggacaaactatcggttcaagttattttattgccagtttttttgctgggcgattgcctctttgcaacaaatacgatttagtcgatctgcaataccaggtgcgtcagcgtaatggtaggcatctccccccccctcccgacaatttccgcaattagcagtttgtgaggaacttgttgctttttattctgatctttcccacaatctcgacgaagggctaaactgtcttcattttcatcggctaaaacaagaggaattgtgtattcttctacgtggttattatagcctggaagacctttatatattattgaaatccgttattggaagcagcgataattttaaagattttgtacttgaaaattatcaacatgtcaatgacgtgagtgattttgcgttgttggctcatatgagtgtacgcaattttcagcgtaaattcaaagaagaatttaagtggccggtacgcgagtggctcaacgaacgtcgtgccgaacgtatcctgcgtgatattcggaatactgataaaagcattgcggaaattgctacaagctatggttttgccactgcatcctatttcacggtattctgcaaacaatattttggtatgacaccttcggaattgaggcggagatcgaaacagacagccacgaaatgtagggagtaaaaatacaaaatgagcgaattcctgtcagcatttcgcttgaagaatgattctggaaggtatgaaaaacaactttacaaggtatgcgaataaatagattgatgttatttatgttactgcttgggtattgtcatatcggttgcgggcaggaacaagtgttggttgataccctgaacgttcaggtttatttccgtcagggttattcgattttggaatttgattatcgggacaacgcaaaacgtttggctgctttcgtggacagtgttcggaccttgcaggggagtgcctcgtgtcgtgtgaaaaccttccgaattgtgggaacagcctctccggaaggcgtcagcgtgttaaacaaacgcttatcggaaaatcgagcgaagaaccttgtagcctggattgaggagtatatttcgcttgaaggagctaccctcgacattcaggctttgggtatcgactgggaaaggttggaaagacaggtcgtagcttcggacatgccgtatcgagacgaagtgttggaaattctgcgcaatacccctgtctgggtaattcgggacggtaaagtcgtagatagccgtaacaggcagttggggatgcttcgtggcggtcgcgcgtggaggtatatggaggagtatttctttcctgaactgcggagtgccggtgtgcgtttggtctgcgagatggaatgtcccgcatccgcttcgcagccggaaccggcgcctcaacctgagcctgaacctgaacccgaacccgaacccgaatccgaacccgaacccgaatccgaaccggtcgtagaatcagcctccgttcccgtcgaaattccagtgcaaccggaatcgccggcctgcaagccgttctacatgtcgctgaaaacgaatctgctctacgatgcggccttggtttctaacatcggtgcagaattctatctcgggaagggttggagtgtcggtgccaactggatgtatgcttggtggaacagcaacaaacgtcataattactggcgcatctacggcggcgaattggacatccgaaaatatttcgggcgccgtgcccagaccaaaccgcttacgggacaccacctcggcatctacggtcaggctttcacctacgacttcgagaccgggcacaaaggttacataggcggcaagccgggcggcacgttgtgggacaaacttaactatgcgataggtgtcgagtacggttactcgcttcccatttcccgtcgtttaaacctcgatttcacgcttggcgtgggttactggggtggagagtaccacgaatatattccctccgacggccactacgtatggcaatcgaccaagcaacgtcattggttcgggcccacgaaggcggaggtgtcgttgatttggctgatcggtcgcgggaactacaatgaaaagaaaggaggcaaacgatgaaaaagttgttcatatatctgtttgcagcgcttgcagtcgcttcgtgcgaacataaagacttgtgttacgaccactcgcatacgatcgacgtagaggtggttttcgattggcggaatgcttccgaggcagctcctgaatctatgtcgctctacctgttcccgacaaacggaggagaggcactgcgctatgagttcaccgattgcgggggcggtacgatccgggtgcccgtcggaaactacggggcgctctgcctgaatagcgacacggagaatgtcacttatcgcaatacggatcaaaagacgactttcgaagtatctactcgtacgaccgatctgttgtccggcctttccgctttgggtgtgcggtccgacggtgttcctcgtgccgacggtacggaaaccgagcgtgtggcgttacccccggatgagctttggagcgattgtacggaggggatcgagttgaagcagacggctgcggcccagacgatcgtgctttatccggagctatcggtttgcagatatacggtcgaaattcgcaatgcggagaatctgaaatacgtatcgggtatcagcggctcgttgtcgagcctggcgggaggcttgctgccgggtgtaggctacgatgcgatcagcgaggagtgcgtcacgataccgtttgacgccgccgtatctgccgacaagacgctcgttaccgggagcttgctcgctttcggacattgtgctgcgactcagaacgcacatcaactgaccatctatgcggttttggcggacgagagcaagtggtattacacctatgacgtgacggatcaaatccattcggctcccgatcagcgtaatgtgaatatcgttttggacgggcttccgttgcccaaacctatcgtcaatggcggtggtttccagccttcggtggatgagtggcaaagtgtggatgtcgatatcgagatgtaaaatgttaatgatcttcccgattttgtgggggggggatttgcatagatcaatgttaaaccctttaattaattcactgatgaaaaaacaattatttttagtggtcgtggcggctcttgccatggcatcgtgctcgaaggacgaatcgacgggcatcaacaatggcaacgcgatcgatttccgtgcagccatgcagactcgtgcttcggaaacgacgacggctaacatcacgaactttttcgtgacggcactcgacaagaacaacgccaactatttctccgatgcggagtttaccaaagatgacgctttcttcacttctactccggcctactattggcccagcgacggcagcaacctttcgttcttcgcttactctccttcggctgcggacttgggtgctaccgtgacgattaattcgacgaccaagacgctcgctgatttcgagcccgcaacgacgatcgccgaccagaaggatttcatcaccgccactgctacgggcagcaaaaccgatgaagcggcaggtgtcgccctgacgttcgggcaccgactttcccagatcgagatcaaggctaaaaacacgaacgacggttatgtttataaggttcagggcgtgcgtatcggacagccggtttcgaaggcgacgttcgatttcggaactacctcctggcagttgggatcggtaaagaccaattatgaagcgacctatgcgggtagcgaaaagacgctgaccggtacggccgcatcgattatggcggtggcagacgacaatgcgatgctcattccgcagcaactcacggcctggactcccgacacggacaagtccaataccaacaaaggtgcatatctggccgtgaagatcaatattacgaccaaggacggtgcccgtgtctatcctgtggcctctgtcggcgaatacgattgggtcgcagtagctgtcgataccgactggcagcccggtcagaagtatgtttatacgctggatttctcgggtggtgccggtaaggtcgatcccgaaaagcccacgccgggtccggaagatccgttcaaaccgggcgaggatgtattgggcagtgccattaaatttacggttacggtaactccgtggacgccggcttcggaggatgttacgatgtaatcgataaattaggatcgggcggggttggaccgcaaagacttgccgtatgtccgaaggtgtagtgtacggcaggcgaggggaggaaggcctccggccctcctctgtcccttcccgatcacttgaggtagccgcagagctaccgttcggctcggccgaaaaacgcgtgaattatataatgtcaatgtaaattatgaaacagattcttgcaactttcccgttacgcaattttctgcgggtatttgctctggtggcagccgtgtctgcgacctcctgttcgaaagacccggcagtggatggagaactgcacggtgatatgcttcgtttcgcagtcgccgaagcggacggctggaatacgcagttgcggtgcagtgctgccgagtcggaagagaagagcgctgtctctccggaaaacgtcgcggaagtattttcgctccggggagaaaaccctgcggacacgttgttcctgcacgcctcggtcgccgacggaatcgccgcaccgtacccgaatgtgcaaaccgaccgattgcagacgcgtgccatgcccgtcgaaacggggaccttttacgattcgttcggcgtattggcttcggtttatacggggacttggagcgaggattcctgcctgccggattatatgtacgatgtcgaagtgaccgaagcatcgtcctggacgacctcctattactggcccggtgccggacgcaacatccgtttcttcgcttacgcgccctatggcggccaggggatcgttctttcggataagacgtcggccggtactccgtcgatcacctatacggtcccgacagccgtcgccgaccagcaggatttgctggttgctgctacctccgggatggccggcaataccgctgcggcggctccgttgagtttcgctcacgcgctcactgccgtacgcttcactacgggcgacgatatgatgtccgggcgcattacgaaaatcacgctcaagggcgtttacggttccggttcgcatacgatgggttccgattcatgggacggttacggcgctacgacagacttttcgcagacacttgcggctactgtggacgggtctgcggaccaggagatcactcctgtcgcagcgactttcatgatgttgccgcagacgcttccgtcgggcgcttcgatcgaggtcgtctatacggacgacctgacttcgacacaacgaactttaaccgcctctatcgcaggcagccaatggccgatgggcagaaccgtcacttaccggatttcgacgtcgagcatcgtaatcactccgacttttaccgtgacggctccggccgattttacctatgccggaggcagcaaaaattattcggtgaccagctatgccgccgtttcccgtccgggcgatgctacgcgaaccgttccggtggcctggaccgccgaatttgtcgaggatgacggcagcgggggctacaacgtgatcgcccgtccggaatggctcacagcttttaccgcgagcggcaacggcggtacgtcggccacgtcgttctcggctacgattgcggcccaaacgggggtcacttccaatccgcataacgaaactttgaaaacggcagcttctgtcagcggcacgtacgatctttcgacctccggcggcacgaccgcgatgcggaccgctaactgttacgtcatcaacgccccgggacagtactccctgccgttggtctatggtaacgctatcaaggacggcggtacgaacgcttcggcctacacttcgcagtccagcggaacatacgtattgaagaccttcgtaaaccatctcgatgcggctatcaccgatccctatatctataacaatgcggggtgtacgcccctggatgccgtactcgtttggcaggacgaggaaaatctggtgacgaatgtccggctttcgtccgacaagcacagcctgaccttcgacgtgccgcaagcgacgatcaaacaaggtaacgctatcgtggccgtgcgtgacacggacagccgtatcatgtggagctggcatatctgggtgacggactacgagctgggcagcgatgtcaggaccgtgaccaactaccagggtatagcgtataaaatgatgccggtcaatatcggctggtgcgatgcggaaaccaccacctacgacgcccgcagcgtgaaggttcgcttcacgcaggcgcagaccggtgccatgcaggtcataacgctcacccaggcatcgcattcggtcgtaaattccggcaaccagccttatttccagttcggacgcaaagacccgatgttggccggtattcgcaacgcttccggctccacagtcgataagggctgctattccgacggctatgcgttcgacaagtcgggaaccggcaaggtcgccatcggcgtttccatccagcatccgcatatattctacaattacggcagttcatcgccctacgattggtgcgccacgtcctattacaatctttggagcgccgacaatacggtgacgacggctaacgacaatgcggtggttaagacaatttacgatccttcgcccgtcggctaccatctgccttcgtcgaacgcctttacgggctttacgtataatggccgcaatgtttccgggtcttcttacttcggctcccgattcaattcgccctatacctccaccaccgattttaccgataatttcggttgggagttttattgtaacaagatgacgggcgaggggagctacgacactgcgggcggtacgatcttctttccggcttcgggctatcgcagcgactcgacgggcacggtgagcggcgtcggcagcaacggcttcttctggtcggccgtgccgtactcgacgtacggcggccgtagcctgtacttcagctcgtcgagcatcagcccgctgaacaacaactaccgctcctacggcttcgcggtgcgtcccgtccaagaataggcgcgaagcgaccatccgattcattggattgatttcctgctgttcgcagccgcagggttttatccttcggatcacgctgcaccgcagcaatatcacctttctgcatgggtttacgattgtggaaaaacggacgtttcggggagatgctccgattttgaagatatgaaatgacgggaaatccggacagaccggctttgcggaggcgcatcgatgcaggccggctcttttcgggtttcttattaaatcccagcggtatccgccgggattttcttatgcaggacgatgggatcaaacaggtgggccttaaaataattcatattatcgctatttgaataccaatagataaattacgcgattcttctcaatagaaattttttgtaagttaaaattttcttacatttgtgatataaagatatggatattcaaatagactatacttcaaaattcatttttagaatgatccactattccaatttggaattcattctaaaacatggattgtacactaagaatagtcgtatgaaagatcctgaatatatcaatatcggggatattcagttaatcgaacagcgacaaaattttcatgttcgaattgatcctccgggcggggatttaggggattatattccgttttatttcggaggccattctccgatgttattgaatattaaaacagggtatcggggtatccgaaaaagaccgcaggacgaattgatttatatcgtttgtcgtattaaggatattgttgcgcaatgtcctgcatggtgctttaccgatggacatgcaaagaataaacttactgaattttataatgacatcaaggatttgacccatgtggattgggaagtcgtctgcacgcaattttgggggaatgatgaagccaatatggatcggatgcggagaaaacaggccgaatttttggtgaaagactgtgtgccggtttcgtgtgtcgccggaattattgtcaaaacggcagaccgtgaagcatatgtaaaaacaattttatctcgtttatccattgagataccgatatacgttgatagcaaaaataactatttttatccatgatacattatgtgacaggtaatttgttggctgcttccgacgaagctttgatcaataccgttaataccgttggtgttatgggtaaaggaatcgccttgcaattcaaggataggtatccttataattttcaagtatatcaacaagcgtgtaaagagggcagcattttcccaggcaaattgttggtaacacgagacagtaacctttcgaccgattctaaatggataattaatttcccgacgaaaaaggactggaagcatcgttccaaatatgaatatattgaagaaggactgaaagatttggtgcgggttcttgatcaatataggataaaaagtatcgctattcctcctcttggatgcggcaacggtggattggattggagcaaggtgaaagagttgatggaaaagtatctcggggaattaaatgtggatattcatatctatcagccgaacgaagccgtcagcgaattgttgaagcaggaaacgaattgtcgggaggcaaaattaactccggcgagagccatgttgctgtacgctctgttttattatgaatcgttaggagaaaacagcagtttattcgtcgcaaataaattagcatattttatgcaattgctgggtgaaccttcatttggcaaactgaaattcgttgcaggacattatggcccctattgcactcaggtcggatatattctgcacgacattaacgggaaatatatcaaaggtctcgaacagatgaagatcggagctttcgattctttggagttgcaatatagcacgatgaaggaagttagcgaatatgtgaaaacaaagttgaagtcggaacaggttgatcgtttgaaattattgataaaattgatctctggatttcaatcggctttgtctctggaaattctcgcgtctgttgcgtatgttcggaaagaaaatacttatattgacttggcgcaaaccattacacagattcaaaattggtctcctcgaaaaaaacatttgttcaaagagaagtatattcaaatagcttattcttatttagaagatttttccaaaggacgagattgtctatttaggactgtaaagtaaaatagcaaattgacgtttatgaataaagaatcccgataagtatttatcgggattcttttacttggtttgtccgataatcttttagctgcaatgcactctatgctcataatttttcatagtattgcggccaacttccgaatctgttgcaatcgagccgtcagtttactgtctttgcgagctgtttgcatattgtatcgagtctgcatattggtaagcatttcggcttcgattcccaatgcagcctcgaaatacaaggccatagtttcggttacagggcgtttcgcgttcagaatttcattgagcatcgtataggaaatacctatctgttcggccaattttttctgcgagatgcctctgtattcgatctcctccttcagtatttctcccggatgcgtaggagtgtatggataacctaaatttcccatagcaattatttatagtggttcgacaactcaataatattgcaaatcgttatttgctctttcccgtcggcttcgtgcgaaaccaaaaattcaatccgatactggtcattcactctgattgaggaaataccttctttatttccagtcagtacctcgtaccccaatgaatgtaactgataaagagcttcgatacaacttgcatcgttaagaatatctatacgttgcttgtagcgtttaactattgtcggttggtaacggtgttttttatctttacactttccttcgtagtataattccgatagatactctttttggaattttacaatcattattgctgatttttacattgcaaagatagtgcttattttcaaaaattcgctaaaaaagtgaatttatttttggcagatatgttaattggcatccatataccgttgcatcatggccatagcgttcgggtcggcgttctgttgtgccgcctgttgcaactgcgtaagggcttcggggtcgatttgaccggctgcggcctgttcgttgaaagacttgacctcggcgagtagtttgtcggcccccggcagcgagcagttattgaggaatatttcgagcggtatgcggccgctttcgagcagtttcatcaataggtcgtcggtcatttgccggaatacgggcgtatcgttcgattttgcggccgtgaggttaaaatcttcgattttctgcgccatttccggctcgtagaatttcgccatctctccggcggttttaccattggtgccgatgtatcgacgggtcgtgtagtattgcatgaggactttaagcagtttttcgtcgcgttcctcgcagaacatattgtaattctcgaacagcacgacgaaattcatcatcgagttttgtgcttgctgggcgtagagactcgacggcgtattggctcgcggaacttgcccctgtaccgctccgttcagtccgctgatttgctgcatgatgttcatttcctgcgcgaacatttcccatgctccgatattggtgccgttcatggatatttgcttcgggagtttgtcgtaggccccttttttgataagaatgacgccgttcgttttgacgtattcgcgtgcgaaatcccgaatgtccatatcgtcgggtatgcactcctgcggaaccatcaacagcccttttgccgaggctccgatgatgaaatccaaaagggtcaatagccggttgatatagcgctgaatgtctattacgtccgataatacggctttgaaccgtccgtcgattacgggcatggccgcaagcacgtaggggtgttcttcgtgtgcatagggactttcggtctctttgatgcagtagccgttcggcgtaaggtatttcacccgccaataatattcgtactgttcacgggcgtagatgagtttcactgtgtctggggcgatccctgcggccataccttgctcgatgcgcgaggcgttgatcgcttcgacttcttgcatcgtgagttcggtgtatatctcctccgttccgtcggcgtagtcatgtatgtatagtacccagcggccgaggcgttcccacacctcgataacgcggtatttgccgaggtcgttcgtgtataggaaattcagattttgaagccgtgaggcgtgattttcatagaggttttccagctttgtatggtcgtggcagatgccataaatttcgcgtaatgcctgcacgtcttcacggcatgtggcgaagttgcgcaccaaatcgtcgaacgtgtagtcgtgcagctctccgatgcggcggatgtctgtcagtcgcggatcttcgatgtcggcattgaaaaatagccggttgatgttcacgaggtcgatttttccgtccgtgcggttcttggtactccaatagccgtagcgtaccttcgcgcaggctatccccgtcagacagagttcctcaacaacgttgatgtctatttttcggattctgttgagctggtggcacgcttgcagggcgttggtcagcatttctccgagcggctggtcgtcgcgactgcgggcatatacgaccgtttgcgtgggcgacgaaaggagttgtccgtgaatattacggatatattgctggatatagttgtgtttgagcggcactttcccgctgcgggagatcagcgcatcttcgcggatcgtccggtgcggatggtcggggtcgggtaccgtgtcgctccattggtcgccgttcttgtatcgcagattccgggagtgctctttgcgcaggtagtccattgcgtcccaatcccgcgcacaacaccacaggagcgttagattgtcgtcggcgtagcgcatcgtgccttgctcccattcgcggcgtgttcgagcgacgcttttatccgtttgggccaacagtttcaaccgccgggtatcaatattccgtaacatggtcgtcctcgtttaatgcgttcatcatcgtttcgttcaattcttcttgtaatcggtcataagctgcggtattgggacgcgtatcggcaagtatcgcccgcagcttgttcaccgccgtttggtgtgccttgaaaattgcgatacgttgcagattccgttgtacggcaggatcggtgcggtcgagtgccggccccatgcgtttatatttggcttcgatattcgtcagacggtcgcggagggtgtaataccgttcggctggattttcggggcgtgccgttccatagaagcgatttattacgggcagatcgcggctgctgatttcttctccggtgaatagcgcctgcgaggtgtgcaccatgtctttgatgaacttacccattccgccgccgtaataggtcaatacgtgttcgacgtgcgaggggttgtactcgaagataccccgcagcagcgggtcgatttctccgttcttgcgtagtccggccggtgtgttctcatcgccgccgcctaacctgttgatccctcgacagaggtaataaatcgctttgtttacgtttctcagtcccatttccgagagcggatagtttgccgtcgtcgagtagctgcggcgtccgacaggataaccgaacgcatcctctccggcataccagatgtcgtaccacggcgtcaaagccgtaggaatcagtacacgtgtcgcatctcctttggatgagggcgaagctacgggcgagaagtcctcatagagcatcgtaagcatcatgcgtgcggcatcttcggagccgagttttcctcggtaaaggtcatgcaaggcagttcctatgccgaagaaagcccggaatccctgtggaagcggaatcttcaagtaaccgcgctttcccatgccggggatgatgaggtggttatgtctttcgtattccgtaacggccagatcgcggccgtcgcctccgcttccggcgaggaagaaatcaagcagcagactgtcgagaaatccagccgccgtcagcgtggcaacagcctgtgcaaatcttttccggttacgcatggcgattcgtgcgacctgtgccgctccctgtaccgaagcattgaaaaagacgtagaacatgccgagcggccgggttgccgtaccgcgacggttgaaattcaccgtaacgttttttgcatcgtcgatagccgtaaggagcgattttccttgttcaagcgatgtggtgaaggtcgccaaacgggatgtgttttcggcaatgcgggaggcattttccagcgcgacgcctattgcttgcataccgcttttgcgggcagcatacgagagccataccccggcgcgttcgctgcgctgcgttgctttcagcagttcacctatacgccccgtgcggaatgcaacgtaacgtttgatctccttttcggcctcggcgatgtctttactatgtacgaaccccgtttccccgccgttttcacggaaatagtcgtaaagcgtgtccatgacccgttcgcggccgaattgccggattagttcctgccgatcggcggtgtcgagtacgtcgagcgtcccggtttcggcgatggtcagcggctcggccttgcctcgcagttcgcgggtgattgcggccatacttgcagggatgttacgcacgaatccttcgagattcccgcctttgtcgatggcgtgtaccagcgcggcgtgctgcacgtcgcgcaggaaattcgctgcgacaaacgccggatttcgggaggtaaaagctcttgccagccagcgtgtcgcgttcccgaccgtatcatccagccattttggaatcgccagccggttatactggttgatcgcgttcgccacggcgggatcggcgaaggttatcacataacggataccgttcacgtaacattccacattgcgctgtcgttcgtaagaatgtcccaagtgtccttcgtgctcgaaacgactgcccgattcggcttcgcggacaatgttgaaccgttcggtctcctcgatacggttatacaggtagtcggccagttcatcatcgtgtgcttgaagtgccgcgttcatctcctttttcagccgggcgatctccttacgtgccgccttcgatagttcgatgtcctcgacggcggggtctatggtcgtcgtaacccatctgttgccgatgccttttgccaaccagaccttatcgacgcggaacaagtcttccgaattgcggctgttgttctgcaccaaccgtaaggccgactgcctcgccctgttggttttggcggcgatgatcgctccgataccgatattcaccatttgagcgatcggattgcggggctttgcgatacgtccttcggcttcgtgcagcactttccgtaaggggcgcggccccgcactgtcgtcgatgaagtcgtacacgtcggccgcatcgaaagccaccggctcgcctttctggtcgcggtagttgtaatcataatcccgtaagggtacatagtagtcccagccgtgcccctttatcaacttgcggtgttcgggggctaacattccgtcctcgacgaggatttccagcacgcggtcgttagccgcattgattcgctgccataatcgctgtgtcggaatctctccggcccggcggcggaaatctgcgacgatacttcgggccagcgtttcgttccacgcatcgcgcgggtcgagggatagggccgcaatccccgttgcctgccgttcgagcgacgattcggccgtgatgtagtcgatgatgtgtgtttccgtcatgcctgtttcacgggctatggctgcgatttggtcgagtatggggtctaaatactctttcgtgtatttgtcgattgcgactttggcgatgcttgtcaagtggttcaaatgtttgtgtatgtccgtgaggtcgtcgatgctgcctccgcgccgcacgacttcttcctgtaatctttcgacgggtaaagtgctatctatgaaccggagttgctgacggcttttccaattccgcttgtcgtaaatcacagtcggttcgattccggccggcggagccatttcgggctgtgcccgtttctttttaagcaattcttcgacatactcgctcgcatatttgaaattctccggtagaggtcgttcgcttttcatcgtgcgtcgccgcaacggagtgcggtagttgtcggagaggacgaaatcgaggtgtttgcgcatggagcgcacgatttgctctttcgtctcttggggtaaggttttcaccagttcgtcgatgatgctgcgatagctttcttgatcggtgagcttttggaggtcgaataatgcgaggtatttgcgcatggccttcaaacgatcattgcccatgcggtcaatgatggctcggcccatgtcatcaagcagtccatatacacgcatagcgaagtcatcggcattatgttcgccgagtaaaactccggtgatatgatgctcgcggatgtagcgttcgatgctataccgttcgatattttcaggtgtagcgtcgtcgaatatcgcacggtaacgcacgttttcagaacgaccgaaaagctgtttacggatgcgtcgttcggtcgctgttgcggcgacggcttcggcggccgtgcgtgttttttgcaggcggtgtttcgacaaccacaacaaataagcgatgtcgcggtcgccgatacgcagcggaagtcgcaatatgtcgcgtagcagcgagcggatacggccgatgatccgggcaaagcggctcggcgtgatgtcgccttccgccaaatgtgcgaggtattcttccgttgccagacggcgggtatttgcctggcggtgcttggcgccggaggattggtgctcctgctcgcgggcaatgtcggccacacggctgcgcccttcggtatcgagaccattgtaaaccttatcgagaaagtcgccgaaacggtcgcccatcagcgagcgtaagcccatgtgtccgacaatttcatgcaatacggtcgcttcggcatcggcgagtgtcgtaatattgggcaggacaatgaacgtttgtcccgtttgcgggtcgtaaaaaccttttgagtgtcgtttacgacgttgcacgagcgggtcggaatcggtaattgcatcgaggtcgtcgataatctcgaccggagtgttcagcgtgcgggcgatccggcgaacgcggcgagccaactccgcatcgcttgccggggcgtcggaaccgaacggattgccaccgtcgcggaagcggaggccgtttcctgcattgtcgtcaatcaattcgtcagggtcgatgtctatggttgcggttccggacttgtcggtttcctcctgtgcttcgatcgctgccagttccactttcatctgctcttccagctcggcgatgcgttcttctgccgcctccaactctgcttgtttgggaaatccattgccgacctgcgtctgtaaatattcgatggcttgttgtgccgtttccattccgagctgccgcttctgtatttcggcgtcgtactcctcaccggagagcactttttcgacttggctgatgacgttaatcatcttagctccggcttcgccttgcaggtcgcgccattcgttgcattggtaataaatcgtgcggttgatgcgctccttttcattggaaaggtaattccgtcgtaaaacaattataatgtcgaactctttgccgttgattccgatgcggagtgtcatgtccgattgtgtacggtcgggtgattggcggagggcatccgcttcggcttcgatgcgtttcgagagcggaacgaacaggtcttcgattttttccggctcggaggctttgagttttcccacttccaccgataccactttatcgtccggaaacaggcttcgcaggaaatcttttttcttacggatttgagcaattatttgcggggttgtttgaaggacgttttgcagtcgtttgagttcatgtgcgacgtatatttgatgttgattgtagtagtcgcgtgcgtttctcagcttgcgtagtttattctgttcgagcgacagggcgagcgccgcagcgctgccggagagtgaggccatcatctgcccgaaattcgtgctgtcgctgctgtcggtttcgggttcttcgagcgagcgttccgtaacctcgcccttcattgcctgcttaatgaacgattccttgattttcagccgttggtagcccgtaacatcaagcgtttgttttactccgaggcgcagaatacgcacgggtttgtccatttgcaggtgcagattgccctgccgcacaatgcggccgatgcgttgcaggtagtccataggacgtatgggtacgtccagattgacgagcatgtgcagacgctcctgcatatttactccgatacctaatttctcggtcgtgccgagtacgatccgtacttcgccgttgtttatttgcttgtagagcgcctcgcgtttcgcgtccgttatgtagtcgtggatgatagcgacctgctgggccggtatgccggcgtcgatgaatttacgcttcatatccacgaaaagattgaagctgtggtcgcggctttggtaggcgtcgcagaaaacagcaacggtgccgttgtaatcggccgttgctttcaaatcttctacgacttcgcgcacggcatgattgactttgctgttgggatcgtccggtagagcgggattaaccagccgcacgtcgattgccgcacgtttggccagtccgaacatgaccagcgggatatgggagttacgacgtttttccttaccggacatagcgtcgtattgagtcagtatttcccgtatgctgcgcatgattgcccgcagcgcaggcgtttggtcgagcagtatatccttcggtttgcctccctcaatgcgcggcgttcctacaccttcgcgcagatccggtacatcctccgtgagtacggtgtgcgcgactttcttccagatcgccagcagttccggcacgttggagtaactggcgaagcgttcgactacgcggaatttgccgtttgtggcaaactcggccgattcctcgatatttccgaaattgttcgcaaaggaatcgaaatcggcgatctcgtactgttcaagttcgtgtttgggcagcagatagcgcaggaacgtccacatctcggccattgtattggatatgggtgttccggtggcgaatacgacgtttttgttctgtttatttgccagaatataagatgttttcagcctcatgctctgcgcccgttgcgacgccgcagggtctatacctttgatattttgcaggttggtggtaaaaccgagcttcttgtaggcatgtgcttcatctaccagcaaagcgtcgattcccaactgttcaaaggtcatcgtctcgtccgtgcggcggtcgagcagacgtaatgcacgagtacgggcctgtgctttgagtttttcttcctctttgactgttttatccgttattttcttgttttccagtccttcgatctgtttcttgattgcataagcctgccgtttggcattgtccggagaattggcttcgatttcttcgagctgttgcatcttctctgcgatcagcgtgtcgatatattcattgacacgctccggggcatccggtatggcatccagatagctgtgatagagtacgacaatatcccaatcgttataggcgatctttgcgaataattcctgccgctgcgatgccgtgaggtctttttcggacggaacgaggacacgggcggccggatagagggattttatttcggaggcgaattggttgaatgtcgagcgttgtacgacgatgcacggcttctgggcgataccgagccgccgcatctccattgccgtagttatgagggtcagggtttttcccgtgccgacttcgtgtgccagcagcgttgctccttgcaaacctcgcatgacaccgattttctgatgctcgcgcggcttcttcgtgtgtgtggcgttgggaaaataatcgaacgatgaaacgtcgatttgtctttcgacggtgctgttgaaggttctgttatatatttcgacgagcttatcggtcgttgttttatcttgtcctttaatccattgttcgaatcgttcttccagctcggtctgtttcatggcggcctgcgtcatcgcttcggggtctttgacacgcttttctttctgagccaaagggtcgtattcgctgcgactgatgtaggtctgcgtcttgttcatccggtcgagtgcgagtttgctccccggcgcttgcggaatccccatattggtatcgaccgtattcccttcgttcgagattttggcgatatacttgttggccgatgttttggcgatatgggccgttacgttgaacgtctctttgaaaaactgttcgtatagggcgatgggtatccatgtgctgccgagcgatactttaatcagcggcagcggaatatccatcggaataattttcacgagcgcacggatgttggcgtcgaactgtccgttttcattggcttgctcggcctgttcgagtttctcgcggacatttcccgagaggtattcgttgcgctcctcataaagacccgttaccggattgacatagataagttcctgtgcgagcagttctttttctgtatcctcttgtggtatgtggagcaattctgcgatatagggcatatcgagccgtccgtagcggtagagcgatacggcgatcgcgtctttcggcgtgtcggctttcagttcgcgtgtcggttccagcatccggcgaaagaagatgtccgacctttggatgtcatgtcgtttctttccgtcgggagttacgatttccttgtcgttttcgatggctgcgatggagggaaaatccacgtcgtcgcgcaggaatgaaatacgcgtgtttcttgataatgtcccgtaacgacgggtgaaggtagcgtaggcgtcgttaagctcggctcgcagttgctcgatgttcggcagatcattgcgttcggcatcgagcagctctgtgatcgcacttttcagccgcaggtaatcgcctaacgcttcgactttactgcggttgcggattttcaacgagttccagtcggcgggtacggcttgtccgaaccgcacgatatatggttttccgtcgatgatcgtaagtcctctctcttttgtactgttgggggcctcgaccgcttgcggtattcgctccgttgcgggtgccggggccgatgtgtagatattttcggggagtgcggatatgaaactgtcgagcgtgcgggactggtctatgtcgcttgtggggacgcagcgctgttctgtggggcgtatttccacgccactttcgaatccgaagcgcatctggccggccatgaactgcggattgtcgtgaaaatacttgttatagttcatgtgtgccgttgctgcttcggtctttaccttcccgttcgacagtttgataattcgttcgtagggcgcctcgcgttccgtaatggtcgattgcatatttacggcatagggtgccggcccggcttcgtcgcgtttgcggacgataatgatgtcggccgaggtttcggtgccggccgtatttttgaatgtaccggtattcagacggactgccccgatgaagtctgcattaccgtcgtttacgacccaattccgcaaatttgcactccgatcgagcgttgctgtcgaggtaatgaatacgcccaatccgccgggtttgagcttccggatgcttttggcgatgaaatagtcgtgaatctcgaaacgtgaggataaatcgcggtcgaacgtatcgtgtactttgaacgttccgaacggtacattgctgatcaccagcgaatagctgttgttaggtatgcgctgctgctcgaaaccttcgatgtggatatgcgcttcgggatagagcgcacgaaggatgtggccggacagatcgtcgagttcgattcctgtcaaatccgatttcgaccgtatcgaaagaggcatcagaccgaaaaaatgtccgatgccggccgatggttcgaggatgcggccaccgtcgaatccgaggcgttccaccatatcccatatcgacgatatgacttcgggtggagtataaaatgcggtggttgtggatgcgcgtgccgcttcgtattcatcggctgtcagtagttcgcgcagttcgttgtggtagggatgggctattttgaagattgctggaataccgccccagccggagaattgctccaatacagctttttcttccggggtggcttcgcggccttcggcttcgatttctttaatgagccggattgcggcgagattggctttgatcttgccaacctcgcctctcggagcgaggtcgtgtcctcgttcgattacatggtttttgtacgaggtgttttttgcgacttcgctttctccacctttttcaacgtggcgatgatctcccgcatcattttttcgctgatgggtatttgttccggctcctccggacagtaacacggtcggaggagttgatagtaatactcgtccactactaccggatcttcgtcccgttcgagtgctgcctgccgccaccgcatcgcccgtgttacggtctggtctatcgaatcgagcaattccgccggattctcccgatactgttgcaacaggcttctcggctgataaaatgccagttcccaaagcgccgtctttgcggcttccgtctccataagcgggatagtctttctcgctactgttttcccgtcgttcatcgtttcgtgtattttgattctcttgtaatatatggtcgagcgtcttggccgctgttatgttgtcaagataagcatttaattctttttttgcaagttcggccagctcgccgacggtaatatctgccggggcataacgattgtgtccattgggtaaaaaggtttgttctttgtttcgcagtcgccataatattggctctccgaagcccataatatcttttattttcaagttattagaatacccgtatcggttgtcgtagctttgtggtgcgacgggtacactgacataaatgcccaaatccgtttcgggtgcccaaagtgtaaacgagccgtcgccgccggccggtgctatattggtctgggcatagatggttttacccttgcgatccgtttcgtgctcccagcccaattcatcggcgaaagcacggctgaatcgctccaaatccttgcggaagttcttttcggggcgtagattgccagtctcgtttgtgtctttctcgacagcccccgtcatgtcgtatattcctgccaatcggtattgtgctcccgttcctgtcggctgggatgttttctcggccttgtcgagatcggccatgtcgaacgcctccacctgctcgtagctgtccatttgcgcggcatattcctccatgccgggcatttggcgggcggcggtgtaaataggtttcagataggggcggatcacgtcgcccagatcggcgatcatccggcgggagaagtcggcgaatcgacgcgctccggcctcaacatggtaagcggccatttgtgcacctatggagagtatttcggggtcgaagccggcgttgagttgtccgagtttctcgcgcatccgtcgtttcagttcctcgtattgctcagtcgttaccaatttgttctgcgccccgtattcgggagctgtgccggccgatgaagcggaatcgtcggctgtttccgattgttgtttttccgctgtctgtcgggcgtgtacctcctctaattccgcatagatgctgtgttggagcggaaatacgggttttccttcttcttgttctgctgccttattgatttccaccactaaccggatagcggcgtctgcactttgttcagccaatttacggatatggtcgatgaatcgttcgcgggcttcgtcattttgaacgatactttgttttttatatcccagtccctcacgggcccttgccgaataaaaacggtacatattatatgccttcggagagtatgaatctaccggaaccaatgccgctttatcaaatagcggatgttggatggcgggctgttcttccgatgtcgggcgggtggcgtcggatgttggtgctgtcccccgaaatgcctcggcgtcttccggggtgtcgaatagaaaactgcgagtgaaggagctgtaatatccgtcgtgttctttggccctctttttcaaactttgaaatgcatttcgttcgatccgttctgccaatttgacagagtaaagagtagcgccggtcttggagtggcgggtttgttccgtagggctgaaaagtccggtttcggccgatgtgtcggatgtcgcggttttcgttcgatgctgactttcggcaagggttgccagctccgcatggatgctgtggcgaggcgtaaggatcggtttgcccgcatatttttgagccgcagcgttggcttccgcaaccaacttgattgcggcgcgaacgtctttcttggccagccgccgcacgtcgcggatgaatccggctttgataaggtcattgttcagcacgctgaaaaccttatcgggaaacgacgcgacggcatgatgcaggtatctgtcgtattcttgggtaattgcaggcggaaacgtatcctcggccgatgtgctgttttgcgggatttccttttgccgttcttctcggagcggtaaagtcccctgcgcatgataagcctccaccgcctcggcaataactttgcttttcgaggcttcggtacgggcgatacgttcctgcaaacggcctatttccgcttgcaggggagctaaaatgtcgttgagattacggtcggagaaatcgcgcggcacgtcgaacagatcgccgtcggaaggttcgtgagacggcccgaacaacgttgtttggttatcctcttcgtaagcggttccgatattgcgtttttcggcagcatagcgggtgcgaagcgtgtgcagttcggccctgtattggtcgagacgggcttcgatctcggcggcggtctcggccgctattcgtcgttcgtcgtcggtgagggggccggatattgcgtccagtccgcctccatgtcgaactgcggccgacccgccgccctgttgtccgagatacgcatcatcacctgctggggcgttacgttgttctccatcgacagtctcgctacgatcgttgccagtcgctccaaacgctgaggtgtcaatcccgtttccgttttcggtttcgtcgtcataatttgctggattgggaggtgctgtctctgtcgcttcaaagttagtgttttttgaagattcggacgcatcctcaatgaataaattatctatttctgcccattgatcctgcgacgtctgtccggcccattgtgcgaaggcgtcgtcatataataattccgtgcggacgcgctcctgttcggcttcatactcctgcatccgggcgtaatcctcttcgtccatatcgtcgtatggattcggagtgtcgttgtgcaaccttacggcagcgttgtaagcctgtcgtggcgaatgtattcgggagagtacttccagcacggcatctttgatcgtcttgtcgtccatgtcccaatgtgcctgctccgtattcccgccgccgtattggaaataaagccgctcggcgtattgttcgggagtgataccgtccgaagataggatgctgaaccgcgagcggcgttcgttttcattgcccgtaaatccgagttctcgggccaacccccgacgattgccgctgtctttccatgcgaacctcaacccgctggcgatgtcgcgcaggatcacgtcctcgatagatacgaaatcacctaactcggccgcagattgggtgtagggtgtcgttcgctctttgcggattcggggtatttctgtgcgggcgggtgccgccgggggcggcacggccgggaccggtgtcgggtgctcttcaacgggaaccgttgccgtggcgtgctgctgtaaaaactgcaaggcgtccgaatacatttgccgttgtccggcatcggccgctccgtcgagcatacgttgtatgattcgttgtgcatcctgctctcctgcggctgcccgaatcgcctcggcgagttgccgggcgatcggttcattgttcgtcgtgtcggtatccgtggcttcattgtgctgcgcaggtgcgatggcggtggtcgtttcggtcggtggtggtgcctcggatttcggggtgagcgcatgggccggtgtaaggacgaattgtccggtatccaactgtacgacgtaactgccgccttgcttccctgtgatgcgcccttgtaccccgtctgcggtaattacttcgtcgccgttggcgtattgtacggcttcgggggtaacgattcgtgcgacttcctctggggcaatgcccgcttcggtgccggtttccatgtcgtattgttcctgcttggcccgattctcagcttcggcctgctgttcgatgatttgagcctgccgtgctgaaaattccgccagcggcgttcgttcgatatgttcgagttccgtccggtcgatctgtccgggctggccggtttcggggtcgaggacgaataaggttccgtccgtagccgcttcgtcggtgtcgcccgaaagtacgacataggttttcccgtccgcacgtcgggccgttatgatttcttcggtcgccgttttgccgtcaagtcctttgtaggcccaccgctcggcggtttgtacggcggtatggagcgcttcgccctcggcatcgcccgtctccatgccgtcgagaatctgtcgttggagtcggaagcgggcatagtcggcggcatgtgcggcgtccattttcccgatattggccgcctgccagtcgatcgcggccatcgcctgcgcctgctggctcatcgtcggcttgtgcatcgcttcgaaaacctgtttgcgcagttcttcattttcgattttggcgagcgcttttttctcctcggtttgcaggacgtgtgttttgtggacgtatgctgcgacgttcggcagttccaacgcagagaaccccgctcccatgagcgacgtggtgagaaacgtcgtccaaaggttttcacccgaaagattctcccgccattgttcgtgctctccggtcagaaggggcgacaggatgcctccggcgacctcttccaaccattcatcgaccgggccgttccatagagttcgattacggaagtcggtaagatacctgctccgagaatatcccggcaatagcttgtcgaacgacagttttacgcccatacgccggccgagctgctcgactggccatttcagtactttctgtacgcctttgccgagttctccgccgatatgctcggtaaacacgtctgtaaacgaatcggcggccgccttatacatgagttcgtacttcggcacgggatgttctgtaaccgtcccgttttctgccactgtgtattgttgttgcgcccgctggtggtagttggtgtaggttccggcctgtaaaggcgtcatagcggctgcgctgacggtatattcacccaatttacgcaggccccgccctacaaggtttttcgcttcttttttgataagggcacgtccgacggtttttgcggctccgctgcccaaaccgctcgttgtggcaaagccggccatgtagggcagcgatgccgcgacgccgctgccgactttcgcgccggtggtggggccgcctcgccgggcgatatactcgtttattaaccctgatgtgcggaacaattcgactatatctttttcggtcggggtcagccgttcgcttcgggccgcttttttcagcgcccgtgtcgttacgatgttttcggccagctcgcgggttccgagcgaggcaaagtccgccaacgtctgccagtcgaaaatttcacgtgtaagtcccgatgtgccgtctccggcctgtttgtccttttctgttttctgattgaggattttcaaggcccgctctgcggcctgcatgagctgcgtatcttcaccgccgagagccgacgggctgcgtagcatttgcgattttgcataagaagcccatgcctgttgccacaaggacgcattgtccgtacccttatccatgcgtgccaacgtctcctgtcgtcgggcgtcggctcgttggcgggcacggtcgtagatcgcttcgatatgttccgtgaggccctctttgatttgccgctcgtaatcctcttcggacatgttcggagccggttttggaagtgcatacgatgcagatatatcgggtgcttcgcccgattcggattcggcggtcagagcggatggtaccgaggcgtcggctccacgtctgcgggtcttttgtaggccggatatggcgttgagctgccgaagctgttcgggggtgagttcgggaagtgagttattcataattcagatagtaatccatgatctgttggtcggagaaaccggcttcgcgcatctgttcggcctgtcctgtttcaagcagattcagtgtttcgggggagtatggcccggtaatatagcgtttcggctgccggaacagcagccctatatcggcgggtggtttcgagggctcctgttcgcccgtgagtttcagataaactgtgcgtaaaagctgtgctttctgtgccggtttgagcttgccatacgagaactgcgggactttttcgcctgtgtaggccggtttcttggtcgggcttccatcttcgggaatgatgcccatatcacggcctttctcgtaaagcagactttcctgtgccggcgagaggcttacgacggtcttttcgtcgcggtcgagaaactggacgacggctttgtcggcggctgcggctgcgcgtgcgctggcggttgaagccgacgctgcggctcgcgtgcgggccactttgaggttattttcaccccgtattttttcgatttctttcttgtcccggagatcctcggcccgtttttgtttctcttgctgggctttccacatatatcccagcaaggcgtcgtattgtttctgcgcgaggttataggcttggccggcggccgaggcttccatgttcgcggcctgctgctcgccttcctgttgtcccatgagggcacggagtttcagttgtcggtattcgcggttttggctgtcgtataatttttcccactcattgatccggtcgagcattcgcagcggagcatcggtaccggttttcggcacataaccttccgttgccataccgacgattcccgtaccgagggccgtaagcatattgctccatgccgcgatctttgcggctgtttcggcgcgtttgatgcgtgcgggatcggcttccggcttcatcgtctcgatgtaggcgagaatcggattttggccgctgcggtatagttctgcggcccgttgctgtttttgctcccatacggctttctgttcctcggcacgctgctgccgccgttgcagttcatccgcaaaggagaaaatggcttttgtcggttgctcttgcggttccatatcgctaattgttgcccgtgattccggcaagtcccgatttgccgaaccctcctaagccatagagcatggcgagttgcccgaacgcatcgcctacgccgctgaccatgttttgcataccgctgattttgcccgattcggcttcgtagcgggcattgtcgaggttgtcgaggcgggcttgatattgttgttgtatctggtctttgtgctgttcgcccaatccggcgatttgggcgacgacctgcgaatagttcttgttgagcttgccggcagcggcgactttcgcttcatccgtcgctccgctcttgatggcgtttgtattgagcgctttgagttcatcctcgttatagtcccgaatacgtttgagcatcgcccgcgaatcggcacggtcgaggtacggttggttcatttccgattgataccattcgtcgagccgtcgccgacggtcttcgagtatttggtcggccttcttgcggcgtttattggccgaaacgccgcctgcgatggaggagagagccgaaattccggctcctatggctaatgcaacgggaaacatgattgtctaatctttatcactttgtaaaattagcggccgcaggtgagaaaatatccttatttttgatcggaatatatcaataaatcagatacttaatgtctcgaaagacccttcaagacgacgaaaagaatgcagtctgcgtgagatacgcgcagacgggaagtctgcgggccgtagcctccgaatacggcatcagtcccatgcgtgtaaagcgtttgtgggaggcgttgggcgagcagcagcaacaagtgctgcgggcatcggtcgaggatttgaggcaggaggtcgagacaacgatcgtccgcagcgagctgacaggcgactatcttgaacgggtaattaaggcgcgggatgcggctattgccgaattatgggcgcgtctgtcggacgcgaagctgcgcagggccatgtccgataaaaatctgatcgcagcctgcaaaacgttgtatgatatgagtagcggggccgaaaagcgacagtccgaaccgaacgacttgttcatggtattgaaccagcgtattcacaacgaaatcaatcacaactattacatacaagagcatggaacgacagaggcagacggttccgatagcgggaattaaccgtgcggaaaatgatttgacggtgcaggacggctgttgcgaaaccctgcacaacctgcgatatgacgcgggggcatggcggaatgtcgagactttccggccggtggcggaaataaccgatttcggaggttttacgttgttgtataagcatcccgcgacggccgatgacctctatatcgcctcggacgaaagcggcacgattcacgaggtgtgcgtgtcgggcgggcggctgtcctcgacacaggtgattatgcgcggggtgtcggagctgcggcagactttttcgttcgggaatgtcttggtgtttattaccgacggtcgggagctatattacgtcctttacggtaatgaatatgtcgctttcgatatgccggaaccgccggatataagcgaatcgaaagaaaatagatcgcgcttcaagaccgatttttatgcagcgatacatcatgatttcgggagtgtcacgtatgattacgtcgccggtgacgacttggcacgcatggataatatcgctccggacggcgggtatttctttacacgcatcactgataagaaaaacaaaacattgctgcttcctgccgtggatggcgaatactggctcggagccatagccgtaatggtcgcctatcgcatgatggatggtgctacggtggcgaactcggaactgatgatcttcgcctcggacggcggagagagcgaggacggtcagtacgtcgattatgtggcggacggaatgccgtcgaaagtcccggaaagtatcagatacggggttttcatcgggacgaaatacaagcacacgacctgcaccaataatttttatatccagcctcaaatcgttatcaatattccggaagggatagatacgcgcatcatcgagagcgtggctatctattccactcggattattcctgtgtacgatttcgaacagacatggaacggcaaatggagcctgtcggatcgggggagcggagatgacaacagttacatgtgggctgcggatttcagaaaactgtttacaaaggacgtggacttgttgcaggaacctctgtatcggattaaagagattgaagtgcgcgattttgtcaagaacagccataaagaggcactcacctatacgcttctgaaaaatgcggagagccagccggttttcgagcctacgcaatcgctccacacgcaggttgcagggtgttactacgaatataacgggcggttgcacaagggaaatatccgtacccgcctttttgccggttattcccgcttttgtttgggtgagacggaagaggggataacgacgaagttgatttgccggttggatatagacaataccagcaagcaagtgtgtcgttctgtaccagcgttccggccgacgaaaatccgcagggtcgcatcataccccgattatcgggccgtccagtttgccgttatggtcgatgaccccggctcttatggcggaaaatgtctgctgaatgtcaagctcgatgcctgcgagggtaataattatgcttatgccgtcggcactccatccggcaatgcaaaatacccgtgtattaaaatgtccgaatcccccgtagagtatgaacagacgaacgacgacgatacttatatcgagacgaaccgcgtacaagtatctgcgacgaacaacctgttttccctgccttttgccaattcgtaccgtttcggagtaagcgaggagcggatcatcgccattgcgacggtggtggatgagctttccgcaacccgtttcggcgctttcccgctctacgtctttacggatcggggcgtgtggtcgctggaaagcggaacaggcgaggtgctctattccaatattctgcctgtcaatcacgaccagattatcaatccgaacacctgcacggcgttggaaacggtgttttatatcacctcacggggcgtacataacctccgaggacgttcctcgcagcttatttcccggcagatcgagcgatacaccggagagctgaccgaatatttgaaaacggcgcagatctgctttcagttcaaatacggggatttgatcgtctataaccccgaatatccgtatgcctatgtttattcgctggcctccggcttctggtcgtcgcgcgatatgaccggacggatacttaataacgggcagatcattatgcgcggcgcgatcgccttacttggcgacgaaacgatgtcctgttccgtcgattgccgcatcgtaacgcgccccttgaaattcggaacgaccgatttcaaacgcctcgaaacagccgtagtgcgcatcatgtcgcaggactgtttcgtgcatgtgatcgccgaagggtcgaacgactgccgtacatggataaccttgcgcgacgtttggtgtcgtgtcggcgatatggacgcacgctttcggcgtacttctacgtcgttcaaattcctgcggttcaaactgcatctgacggccaacgagcggttgtcgatgaccggtgtggatgtcgagtggtatcctcgctttacgaaacggttgcggtaggggcgttacattccgttacaaaacgtgacgaatcgcactgcgcccgatcggaaattatttgtcaaaattttcgtttgtgtctgaaaaaatgtttttttgtgtaaaatcttagagtatggacgaaaaattcgcggcgctgaaaaagtataatttctgggatggcaatattccggctttgggatatttgcgaaagcattatacggataagattgccgattatgtcggcaataagctactgacggcattttttagagtctaaaatgccgacaaggttgtatggttgcaaccttttttactgcattaactcaacaacatcttccggtaacattatatcaccattatcctccttcggagtatttttaagaaacgacatcggaacgatggtgtagttcttggcaaatggcaatagattagctttgcgaagaagttcggctgtcagttgtttactattctcttgggttgtccatttgcattcgccaaccaacagatattttttatcgagcgattctgccatcacatcaaattcgacttgttccggcttcttgtcctcattgagaacagaaccccaccagcgttttgccttgccataaatcactccattgacaatatttcctgtaaccgcatcccggcacagtttttcccattgcatactcacatactctgagaaatgggcgttcaaagcctgttctattggcaaacgacgatcaagttcgatgaacgaacgattaggaacaacaaactgatagtagaatgccataaacggatcggctatcttatagaggctcttttttgcattcttttcatcaaccccgaacggaacatctttttccaagaatccgagatcgacgagtttcttcaatggacgcgacagattggttgcaggttcgttgcatcgtgcggcaatctcggaaagccggtttgcaccggtaccgatataagacattatcgtcgaagtcttgacaatatccttcacatcatcctgaaagagttttaccggctcctcgtaaagtgttccattcacagaaaggatattgtgccataaggcatcagcaagtgaacttctgttttccctcagttcccaataacgcggtacaccgccccatactgcatactcttcaatggcattcatcgcatcaagactcaaagcctcctgaatatacggtaaacgtattggcgcaagtctcattatctcatcagcacgaccatagagaggcgcagtagaatcaaggaacagtccatacatcatattttgtgatgaaccgcaaagcaccaggttatacttcaactgcttctcatcaacaagtttctgcaatacagacggcagttccggagattgttccacaagatacggaaactcatccaagcatagagagaaacgtttgtttgtccgataattgaccgcacgaaacatggattcccaatccggatatgtcagtttgtcgaaatccgggaatacttgtgctatcactttggcgagcaatgtcctctgatgctgtccttctgaacggtctgcaaggaagtaaatatcattgtccgacaacacccttttgataagcgttgatttacccaatcgtctgcgaccgtacactacgactaacgaggactcctctctcgcaagagcatctttcagtcgtgcagcttcatctattctatcaacaaatttcatacgccttatttattatgcaatgcaaacataatgattttgcggcataatgcaaattttcaagacttgttttttatcttcgcagaactatttatgtataggagaacatacgctctgtccctttttcaaggcgcgtttctttggcttcaaactattgatatggatgcgtttgataataatgtcgtagaatcttacaaaatgtcgaaatctattttttgttgcaacctcagcgtggagaaatattggtcggccggaagattcgatacccaccaatcgaaaatctcgtcggtcgtggcgtggaaacgttccatgtagccgttcgtgtcgatcagatattgaatactgcgttttatggcccgttctacgccgggataacggcggcggtctcttgctttgtttttaaccgacgacatcggacagaagatacagccgatacgttggtatccctcgtcgtataaccggcaatagggtaagttattaccccgaatgaaattccatacatcggaatcctgccagcggtaaattggcgagagcatgattttatctttgcctcccacacacgcgaaatcccgctctttattgcggttgaattggtcgaagctgccggaaaagcgatgattgccgatttgcacctcgttccgcgctgctcggcgtggactttcagcggctcggatacccagcagagttacggttccgcctccggcctgttctttcaaataggcgcaacaatagcgcttggtgcgtatcggcagcatttttttcttctcgatcaacttgtaaatgttgatttcgggacgatgtaatacgacatcgggatattgtgagcggacgaaacgcatcagttccggcgggtcgatgttcgtaatttgcatgtgggccttgaatttcactccggccatctttgcgagatgatataatgccacgctgtctttccctcccgaaaaagccaagtgatacccatccggcgacatacgcagggccaacgtttctgcacgtcgtaggagtgctatcgagtaagcgattttatgttcgagtgctcccatgtgctcgtggggttaaaacaccctgccgcgcatagcagggccacggcatcagccgttcttttctacaagttttttgaaatgaggataaggccggaactgcggtactcgtttagccggaatcgacaactgttcgcctttggtaatgttccgtccgactttcgcccggcgtagccggctctggaaaactccgaaccctcgtaaataaacgctatcgccggcagcgacgtttctcttaacgagtttcatcaaatcttccacgacagacagaacttcctgtgcgctcatgcctcgcttctccgcgatctgatctactaattcttttttcgtcataggtttgtaaataaattgattacggcactattgccttattttatgtgctgtttgtgtcttaaaacgacatccattcgggcaaaagaattgaaggtggcgatcgcgctggtgtgggtggccagtacatcccgacggttggcgatgctctccataagccgttctatgtcgtgccaatccgatattctctccgtaatgctccggcaattcgctaatgtcagaggacgttcgaactcgaacatgatgggataattgcatcgtgtccataaaaacattttttcatgtcgggccaattcattccatcggtggccgaatgaggcaagagcgagccggtcgttttccggcatggtttcccccgcacccccttccctttcttcaataccgtgtgtatgtgtatctgttttgccattattctctttattcttcttttctttcttatcggaaggaatagccgtttcttcggcagattgcggtatatcttccgaatcattctgcataaaccggcatttctgcgtattttttcggattttcacggaggaatcggcgattctttcggaatcatcgtctattgttgccgaattatcgcctatttcttccgaagaaataagcgagtattcagcatctattccggctttacgccgcagaaccgccataatatcgagataacgggcttgaattccccgtgaggtcagtaattcacggtgttcgtagagctgacggtcgaacaatcccagttcgatacaatcgcggaaaatgttggaggtacggtcatcgtccaataggcaggtgtcagcaatgtcagcgatcaggtctttgtcggcaacgatataataccctttatcccgataaatttcacaaagcaaggcgaggtaaacggccagtccgtcgttttgccaacgacgcatcagccgttttaatttccggtcttggaataggtcgcagtccaaccggaaatacataagtcctctttttacatttcgcccggccatcggatttcagttagcgtaactttcccaattcaacaaggcgttttaccgtgtccagctcgatacgagaataggttactttggaatttcccgttcccggcttgacccgatgcacccagccgcgattgagccatgtacgcacgcaactttcaccgtaaatccgatacgcttcgcgttgggaaatttcatccttaatcaatcccagtcgatttaaggctatcgaggctccgagtgcggcactttccatgattagggtcttttgttcgtgtaaatcgtccataacgtcataagtattcctcaactatttttggatgccgatgctatcgaataatcgtcggatctcggttcgggagagttttgatccgttgggtgccgaggtacagagaatgtaaaaatgcttgtctttggaacgggtgcggaatgtcaggccccgtcgttccatgcgtggaatagcgtggcgggcattggtcaaagcctggccttccagcggaaatttccgaatttcccgaacgctgaaactactcaaaatttcactccatgttcggggtaattgttccgttttaatcgaatgtgtcttaccgttgtagtccatttgttatatctcttttcaagtgagtgaaatatgtaaaaatcacacgtttacggtgaatacaagttacaaaatgagccgtgaataggaaagggatttttacaacttggacgtatctgatagactgacaaataaataaaatgcgccctcccgcatatttgccggagggcgcagaaatcaataattatatatttttacgatgcgacaggggcttgtacggacttttccggtgctgtttcatttgaaatatattttgaattagtcagcgaaacttcggtttgattgctttttacaaaatcaataaccgcacgattggctttatcgacgatgttccaatcttcggtgatataaatgtgtgccaatttcttttcttctcgtggagaatgtccgagggcgaaattgacaatatcatcgcggatgccgcaatgattccatgcaatagatgcccatgtacgccggaaagtataggtttccaaatccggaaaattgattacttttcctacccgtttcagtcctttgttcacctgtgcgttgaatatatcgctgtttgcatatttacgatgaaattcaaacaggcgtactcccgtaggatcgcggtatttttcaattaacgccaatgcctccggctcgattcgaatgtcgattttcgctttatcctgtcgccgattttttgttttggtacggttataaattaagcgtccattttggatgccggtacagttatataaatcaaccgtgtttattccgatcaagaagaatgatagcaagccgatgtctctacctaaatttctaatgttataatcgcctcggcgctggaatgtatcgtcgtctggaacattgaaaacggctcgtaattgctctaatgtcatcggctttttttcagtccgaggaatcgggggaactttggttcgagagaatggggagagaggaatgcggataacaccgatgtcttcatcgttatactcggctttggctacattgtgcaatgctttcaatgtggcacaatacaacgacggactgcgtcggccttttttatggcctgcgcggggcttttcgttttcgaggaaagtgataaactgttttacgactctggatgttatttcgttaatatcaattttattccgccgaagaaatcgcacaaatgcgttaagtgcacattgatacatgtccgcattgcctttatggtcgttatctcgtaattgttgaatatgccgcctcccaaaagcgataaaatccaatttgaaattttcatcctctttataattcttgataagttctacgatctgatctacattcatcgtctcgattttgtctgcgcacttattgcagattttccggtattcgtcgataataggcatcgtatctcggacataggaggtgccgcgcttgaaatcgaatttttcgtttacctcggaagagctcgcgtaatagcaggtcggaatataccgggattgtttgttgtgggtgatccgaatctttactctgaaaactccgtccgcttttttgtagcggggatggataacggtcttaaaagtcggcatacggctaaaaattttggaaaactattagaaaactttttacttcaaatgtacctttcaaatgctgaaaatgcaataaaaaaacggtgtctgaacgtaagtcagacaccgctaattagttaaaattcagtgcaaatgaattatttatgtaaattttgccgtttccgtttttgcgccgtttagcaaactggtggtttcagccactcacccaactctccaaaccctcttttttctcaaagagtggtgcaaatataggacaattttgcggacttccaaaataaaacaacccaaaaatcatgcaggttcccgctttcgactatctacggccgggtattccacgccgacgaagtctgataaaggctgatcgcccggtcgagcagctcctgcgaggggatgccctcctccagcacgaggttgtagcggtcttcctccgtgggtgaaatccggtactgttccgcccggttgacgggtgaaagtacggtgaatacgtcgccttcgagataacccaggtcctgataggtggcgacgaaggcccgttcccggaaatcgtcggacaatgcgtcctgaccgaagaaatgggagtcgtaatccatccccagcagcgagaagagcgtaggcatcaggtctatttgagagatcaccttatctacttgttgaggtgtgatgagtcccggagcgaagatcagggcgggaatgtggtatttctccagcgggatttcggttttgccggcactcgaggcgcaatggtcggccgtaatgacgaaaaccgtgttggcgaaccagggttggcggctggcctcttcgaagaagcgtcccaatgcgtagtcggtgtacatgacgcctccggagcgcagtttcgcatcgttcggaatcggaatccggcctgccgggtaggtgtagggccggtggttgctgaccgtcatgacgtgggcgaagaagggcgctgcggtcgtatcggcccgctcgccgagcgagcggatcactttgtcgtaggcgtcttcgtcgcaaacgccccagatgttggcgaaggtgatctcttcgggtttgtagcttttttggtcgatgattcggtagccgttgccgccgaagaaggtttccatgttgtcgaagtagctgttgcctccgtagaagtagtaggcatcgtaacccttctcccggagtacggccgccgtggagtgcatgttgtcgttgcggggacgtttgatgatgctctgtccggggcagggcggcagcgagagggtaacggcttcgagtccccgcaccgtgcggttgcctgtggcgaaacactgttcgaaagcgatccccattttgtagagagagtccaggtggggcgtgatcgcgtccggatagccgaaatgctgcatgaacgaggcgctcatgctctcgatggtgatcagcacgatgttgcggcgcagcgtatccgggttgccgggaatgtggcgcaggttgtcgccggtactcccgtagatcgcgtgtacgttggcttcggcctctttctgcggtagggtcaggtagaactgcggatagctgagttcgttcttcataaatgcgtcgtagaacttgtaggctccggtggcttgcagctcgttggcataggtgttggcgctttgctggaatcgggtgttgaactgcaggagcaggcagcagcccagggtgagcagcaggtaggcgggcgatacggccgctttccattgccaggtgccgaactctccggcacggcggatctcccgtctgaacagcagccaggtgcatcctacggtcagcagcagcacgccggcgaagagcggaacgaccggataggactccatgatgttgccgaccacttcgttggtatagaccaggtaatcgacggcgatgaagttgtaccgtacgccgaattcgctccagaaaaaccattcggaaacggcgttcaggataatgccgcccgtgtaaagtcccgtcaagacggcgagccaggtgcggctccatcccggacgtatttggggaaggaacagtctgagtccgaaactcacggcccagaagccgaagaggatcgaggcgatcaggggtaccacgctgccgtattcgtcgaagatcgtattgaagaacgtgacgtaaatccatgcgaccgaaaggatgccgaagaggatgtagcccagcggccgggcgtatttgcccggggcgatgctcagggcgaaaagccacagcacggcgaatccgatcgtaagggcgcaccagtcgtttacggcgcccaacaggaagattttcagccattggccgaaagtgaacgagatgtcggaggtctgttcgttgaacagcagaacgatacgcagcagcgtgccgacggctacttgcagcagaacgagtttgaggtagattctcgagatgagtttgatgccggattgcatggagtttgcttgttaaatcggcacaaatatatatattttaaccgcttttgatgcgcgggggctttctgcggggctaaaaaaacggccgggcgggaaggatttgcattttttttgtaattttgcataattatttcgcatacaatggcagagaaagataaagaacttatagaagatatcgagaagcaggagtacaagtacggtttcacttcggatatcgaaaccgaaaccattccgcgcggcctcaatgaggaggtggtgcgcctgatctcgaccaagaagggcgagccggagtggatgaccgagcgccgcctgaaggcttaccgtcactggctgaatatggtgcctcccacgtgggcgcatctgacgatccctccgatcgacttccaggacgtcatctattatgcggcgccgaagccctccaagaaactcgcgtcgatggacgaagtcgatcccgaactcaaacgcacgttcgacaagctgggtattccactcgaggaacagatggcgctggcgggtgtcgccgtcgatgccgtgatggactccgtatcggtcaaaacgaccttcaaggagacgctggccgaaaagggaatcatcttctgttcgatgtccgaggcgattcgggactatcccgagttgattcagaaatatctgggaagcgtggtcccctataccgataatttttatgcggcgctcaacgcggcggtcttttccgacggttcgttttgttacattcccaaaggcgtgcgttgcccgatggagctttcgacctatttccgcatcaatgcggcgggtacggggcagttcgagcggacgctgatcgtggccgacgaaggagcttatgtcagctatctggaggggtgtacggcgccccgccgggacgagaaccagttgcatgccgccgtggtcgaaatcgtcgtcgagaaggatgccgaggtgaagtattccaccgtccagaactggtatccgggcgacaaggagggcaagggaggcgtctataatttcgtgaccaaacgcggaatttgccgcgaaaacgcccggctgtcgtggacgcaggtcgaaaccggttcggctattacgtggaaatacccgagctgtattctggcgggcgacaattcggtcggagagttctattcggtggcgatgaccaaccatttccagcaggccgataccggtaccaagatgatccacgtggggcgtaacacccgcagccgcatcgtatcgaagggtatttcggccggtcgcagcgagaactcctaccgggggctggtgcgcgtggcgaaagcggcggagaacgcccgcaactattcgcaatgcgattcgctgctgatcggcgacaagtgcggggcacatacttttccggtgatcgaaagcggcaatccgacggcggtggtcgagcatgaggcgacgacctcgaaaatttccgaggagcagcttttctactgcaaccagcgggggcttacgaccgaggatgccgtagggctgatcgtcaatggttacgccagggaggtgctcaacaaactgccgatggagttcgccgtcgaagcccagaagttgctggccatcagtttggaaggttcggtagggtagtttgtcggaggaatttccgccggtttccgggtagaaacggagtcggcggtgtgtttatgaatgtaaaaaaaagtaaaataatatgctttcagtcaagaatttacgggcgcaagtcgccggaaaagagatattgaagggcatcgacctcgaggtgaaggccggcgaggtacatgccatcatgggaccgaacggctcgggcaagagcacgctggcttcggtgctggccgggaacgagaaattcacggtcacgggcggcgaggcgaccttcctggggcaggacctgctgtcgctgcccatcgaggagcgtgcctgcatggggctgtttctcggatttcagtacccggtggagattccgggcgtgtcgatggccaactttatgaagatggccgtgaacgaacagcgcaagttccggggtgagaaaccgcttgcgccggccgagtttctgaagttggtgcgggagaagagcgccatcgtggaactggactccaaattgatttcccgttcggtgaacgaagggttctcgggcggtgagaagaagaagaacgagatcttccagatggcgatgctcgaaccgaagttggcgattctcgatgaaacggacagcggtttggacatcgatgcgctgcgcatcgtcggtatgggcgtcaccaaattgcaccggtcggacaatgcgacgatcgtcatcacccactaccagcgcttgctggattatatcgtgcccgacttcgtgcatgtgctctacaaggggcacatcatctattcgggcgaccgttcgctggcgctcaaattggagaaagaggggtacgactggcttatcaacgattataaggagtagccatggagtggaccgatattttcagcggcccggctttcgagccggtcaagagccgcgaactgcacctcggaaaggattgcgacctgtcgcgtccgttggtggtgcgggataccgataaactgaccgtcgaggtcgcgggcggagccgcactccggctggtcgtgctgcatacgaagccctgtcaggcggagattcgtatcaagctgctcgaaggggcggatgcggagcttgtccagcttttctcggccgaggcattcgtcgattttcaggtcgagcaggctgccgggagcaagtttcgcatgacggcgtgccagttcaccagtgcgaatgtgcgttaccggttcgatctgaacggacgggaggcttccaatgagctggacgtgctgtttctcgcgttggagcaggatcactgcgtggtcgatctgcgtaccaaccatctggtcccggactgtacgagccggtcgctcatcaagggcgtcgcttcggggaccggccgtggtgaattctgcggattggtttatgtggcgccggatgcccagcataccgatgcccagcagcagtgccgtaatattctgttgagccgtacttcgcgcattgatgcgcgtccacaactggaaatttacgccgacgacgtgcgttgcagtcacggagcgacggtgggacagatggaggacgaagcgattctctacatgcgtcagcgcggtctgaaagaggaacaggcacggcgcctgcagatcgaaggtttcgcggcggacgtggtcgggcgctgccggatcgaagccgtgaaagagatattgaccgatgccgttgtccggcatttggataaaatatagcgttatgttcgatgtggaaaaagtccggcgggacttcccgattctcggggtgcgcgtgtatgacaagccgttggtttatctggacagcggtgctacggcgcagaaacccgagtgcgtgatcgaaacggtcgatcgcctgcaccgggagtcgaatgccaatatccaccggggggttcattttctttcggaggaggctaccgagatgtacgaggctgcccgggctcgtatcgccgagtacatcggtgcggaagcccgggaggaggtcgttttcacggccggagctactgcgtcgctcaatacggtggcgtatgcatggtgcgaacgttttctccgggcgggcgacaatatcgtggtcagcgagatggagcaccattccaatatcgttccctggcagcttgtcgccgagcgcaagggtgccgaaatccgcgtgctgcctttcgacgaggaggggcgcctgatgaccgagcgcctgccggcgctgctcgacggccgtacccgcgtggtggcggtgacgcaggcttccaatacgctgggcacgcggcccgatctgcgtccggtgatcgacgaggctcaccgggtcggtgcggtcgtggtggtggacggatgtcagggtgtcgtgcacggcggtgtcgatgtgaaagcgctggactgcgatttttacgccttctccggtcataaactctatgccccgacgggtatcggcgtgctgtacggcaagcgggatttgctcgactggatgcctccgtttctctccggcggcgacatggtcgatcgggtgtcgttcgaaaagacgacttttgcacctgttccattgaaattcgaagcgggtacggccaatttcgtgggggcgatcgcgctgggcgaagcggtgcgctatgtccggcagttcgatgcggcggaggtcgaggcgcatgaacgggcgctgctgctgcgtgctaccgaagggctggagcgaatccccggcctgcggatttacggtacgacgccggacaagtgtgcgatcgtatcgttcaatgtcgagggggtgcatccctatgatatgggcatgatcctcgacaagctcggcatcgccgttcgtacgggacagcactgtgccgagccggtgatgacgcattacggagttacgggtatgtgccgggcttcgttcgcgatgtataatacgctggcggaagccgacgccctggtcgccggggtcgagcgggccgtgaagatgcttaaatagcaaggatatgctgatagtattggaaggactggacggcgccgggaaatcgacccaggtggaacttgtgcgccgcatgtttgcccaagagggggtggagagccattttctccattttccgcgtttcgacgcgccggtgtacggcgagctgatcgcccgcttcctgcggggtgaactcggggctgtggacaaggtcgatccttatctggtcgctctgcttttcgccggtgaccgggccgatgctgccgcgcagttgcgctgttggctcgatgcgggccacgccgtcgtgctcgaccggtatgtctattcgaacgtggggttccagtgcgccaaattgcctgccggggaccggcaggaggagctgcggcggtggatcctcgacctggagttcggctattacggaattccccgtccggacgtgtcgctgtttctggatgtgcctttcgcctttacggagaaaaagctctccgaggtacgcgaaggcgacgaccgcgaatacctgaaaggggaacgcgacatccatgaggcatcgctcgacttgcagcgtcgtgtgcgggaggtttaccgtgcagccgctgctgcggacgaccgcctgcggattatcgattgcagcgatgcgcagggcgggatggactctcccaatgcgattttcgcccgcatccgcaccgagatagaacgttttcggtaagcgagggcagagcccgcaagcggtctctgccgagcgaagaaaacgaagaagtcaattcaacgttttcggtaagcggggcagagccgaatttgtgtggattgtgccgggtggagaaaacgaagcgtggaattagtgtatgagatgagcgccttttcgaatgatgccggagaagtgcccggaggggcggttcggtatattcgataagcggatgagtcgttttgtccgtgtcccgacggatgcggagcgttgagcgaaaagggagtccggaaaaagtcggcaatccgaaacggctttgcgggacgctcggacgcagaccgaaaggcgggaagttttgagttttaacgatgagaacgactccggacgagtgcgggatgcctgcggagaaaatgaagaaaagatcgtatataacctgttcgaaaatgatgaaacctatgctgtcgcaacgggcccggagcctgattaccggagtttgccgcctggtgctggccgtcgtgttcatcgtgtcgggctttacgaaggtgatcgatccctggggaacgtcgatcaagatcaacgaatacctcacgatttacgggttcgattatctgattccggccagcatggtcttttcgatttggctgtgcggcgccgagatgatgatgggttgcatgctgctttgcaaggtgcgtatccggctggtgtcgatcttcgctctggtgtcgatgcttttctttacgatccttacctttttgagtgcgacgttcatcccggtagaggactgcggctgtttcggtgaggcgatcaaactctccccctgggaaacattcttcaagaacctggccttgctgccgatggcggccgtcgtgtgggcttattaccggaacgataagattcttgccttccgccgttcggaggtcgcattgacggtttttttcttccttctgacgatggggctggggttctattgctattgtcatcttccgttgatcgattttctgccgtataagatcggggtgaatatccgcgaggagatgcacgcctcttctgcggccggtcccgagggagagttgcagaccgtgctggtttatcgcaatcgcatgacgggggaggagcgggagtttgcgctcgatgatacggagtggcaggacgatacggtctgggagtgggtcgatacgaaaattctgggagaggtaccggagatgaatccgatgatcgaggagttcgctctgcgcaatggcgcggaagatgtgaccgaccgggtgctcgctactccgggacggctctatttgatctgtgtgacgcgtttcgactgcatcggccgcaggtgcgaggatcgtttggagcggctcgtggagcgtgcgttgcaggaaggggcgcatgtcgtctgcatcacgcccgaacccttgcagggaaacgccatccattcgttcgggaaaagcacgccggttccttgctacaacatcgatggatcgacgctcaagaccatgttgcgggctcatacgggtattgtcgtgctcgacgacggggtaatcgccgacaagcggaactgtcgggacatagactgaatcgggcgtcagtatttccggtgctatgcgcggaagccggggttgctccgggctgcggaggcgaggggtgagttcgggttcccgacctgccgagtaccgggacagacgttccgggtattatcggaagtagagaatatgcggaagggcgattccttccgataaaaggcggtgtgtcataaaggcgcactgctgcgtcattatcgggatgcgggcgaagtcatttacggcagtaaattcctgtcgcccttaccctcaatgccttgccttgcatccattctgacaatccttaagggctgtgcctgaaactttcatttcgacacagccctttcgtcgctttttcgtaatttgtagtgcttcggcctatttcgtattgacgatcgcgatttcgtcggctaccggagcgatcttgcgcagcatctgcacgccgccgcaatgtttgtcgtgggccaggttgatggcccggcttactttcatctggtcgttttcgcattcgcattgtacgttatagacgatgcggaaagacttgaagacgctgctcgattgtacggtttccgtgtcgagttcacccgatatgctgagttcgaagcgggtcggagatacgcgctccttttccatgatcgccatcgcggtcatgcctgcgcaagttacgccggccagcaacatcagctctttgggatttagttggtcgcatttcttgtttccttcgaggacataggtccgtgccgaagtcatctgtatagttacctgttggatcataacgataaatttttaggttgaattttctttttttgtttttatccggcagaatacgcaggcggtttttgccttcgttcgtcgaaaagattcttttttcttttctgtcgggcaacaatcgttcccaaatggtgcgtctgccccgggaaatcgttatctttacgggaaatgactccgatttgaacgaatgcacgggactggggctaaataaatttggcgctgggcccggctttcgctatctttgtagaagataggattcggttcggcaattttcgagagcaagttctcttggttaccctcgcttttcactatctttgcagaagatcggaggcggttcggcaatctttgcgtgcaagcccgcacgattgccctcacctttcacgatctttgacatagtcttagataggatgcgcctcggaaaattgggaacaagtttccatttttctctcggctttcactatctttaccgaaaaaatatttcgattcggacaggaagcgcctcgggcagcgctgaacaggtcggacttaccaccgggtgttcgctatctgcgttcgaattattgtgtgtgcgttatgaagagaaacatcctgtatttattgtcgataggcatttgcctgttcacttgtgtcgggagccatgctgcggcaccggaaacccgggcgcatctggagcgggggcgttcgcttttcgatcacgggcgctggacggatgcccgttatgagttgctgaaggcccgcgagggagcggaccgggacgaccggcttacgctccagcagatcgattatcagttggcggtttgtgccttgaagctcggcagccgggatgccgaggcgatgctcgccgacttttccaagcgttatcccgagtcggtttacaacaacgacctgcggttcgcccaggggttgctttattgcagccggtcggagtatgataaggcgctcgcatgtttcggacgggtgaactaccgggctttggacagaacccggcgcgagcagtacgacctgcgcatgggatatatcgaattcggccgggatgactacgatcgggcgatgacctatttcgaccggatcaatccccaaagcgaattttacgatcacgctctctattataagtcctacatcgcctatgcgcgggaacagtacgactgggccagaagcgggttcgaacgattgcttaaaagcgaggcttacggggaggtagcgccctattacctgctgcaaatcgagttcaagcaggggaattaccgctacgtggtcgagaacggcgaagagttgatccgccgggcatcgccccgccagcgggccgaactctcgcgggtcatggccgaagcgtggttccgcctgggcgaatattccaaaccgctggattacctcgacgctttcgtgcaggccggcggagaaatgggccgggatgaaaattatctctacggattctccctctaccgtacggcccgctacgacgatgccgcagagtatctgcgcaaggcgtgcggagccgacgacgctctgacgcagaacgcctcctaccacctggccgactgttacttgcgcggcggggacaagcagcaggcgatgcagtcgttcgccatggcttcgaatgccgaattcgattccgcgattgccgaggacgcgctgttcaattatggaaaattgcaatatgaactggggggcggacgtttcaacgaagcgattcaggtactcaaccgctatgtcgcccagtatccgtcgtcgccccgtgtacgcacggccaaagagctgttggcggcggcctattacaattcgcacaattacgacgaagcatacgagatcatcgcttcctatcccgatcccgatggcgacctgctggccgccaagcagaagatcgcctatttccgcggcttgagcgcactggaaaagggcgatacgcagggggccgggcgttatctggcggagtccgcccgtatcggaatcagtcccaaatacaatgcgctggcaaccttttggcagggtgaaatcgcttacggcaggggaaattacgacgttgctctgcgcgattacgagtcctacctgaagcgggcgccgaaaaccgagcccgaatatgcgatggctttctacaatacggggtattgccacttctcgaaggagaatatgccccgggcgcgggagtcgttcgttcgcttcatcgaattgtatcccactcaggacggttatcgcacggatgcccgcaatcgtctgggcgacacctactattcggatcgccagttcgacgaggcgttgaagtattacggacaggctgcggccgcgtccgacgacggagcggattacgctcgctaccagcgggccgttacgctcggtattctgggacgtacatctgaaaaaatcaaggcgttgcagcagattatccgcgacggcaggggagattacctcgacgatgcgacttacgaactgggccggactttcgtagcgcaggagcgctaccgcgagggggccgcagtgctcgaacctttcgtcgaaacctatgtttattcgccctaccggagcgccgcgttgtccgagttgggactggcttacctgaacctgggcgacaagaaaaagtcgctttcctactatgatatggtggtgaagaccgctccccaatcctccgatgccaaggatgccttgcaggggattcgggatatttacgtctccgaaggagatgccggcggttatttcgattatgcccggaagagcggtgtcgaaggggaccttacggccatgtcgcgtgattcgctttcgttcgctgccgcccgccggatctatctttcgggcgagcctgcgtcggcggccaagtcgctgcgcagttatctcgaaaattatcccaagggatattatacggccgatgcgctctattgcttgagcgattgctacctgaagacgggcgaacgatcccgtgcgatcgaaacgctcgcggctctggccgatgcgggacagaatcagtacacgcatcgggctttgaagatgctggctggaatgacttttgccgatgaacgctttacggaagccgcggcggcttaccgcaaattggccgatgccgaaagcaccgctgccggaaaagccgaggccatgaacggctacgtccgtgcgacgatcgcggcgggggacgaggagcggattctgtccatggccgacgatgtggcatcctacaccgctgcgggagacgaggcatggcgagcgtcccagtttgcgaaggccgggattctggatcgccggggagatgccgctgccgcgcaaaagatctacaaggttttgagcgccaatgtgaaaacacccgagggagccgagtcggcctaccgggtgatcgagtccgcgttccgggccggcgatacggctcgtgccgaaaaactggtgctcgatttctcggacaagggaacgcctcatgccttctggctggccaagtccttccttgtgctgggcgatatttatgtgcagaagggcgacatgttccaggcccgggcgacctaccagagtatcgtggacggctacactcctgccgatgacggaatcgttgcggaagcgaaagagaaaatcaagaaactcaattaacgatatgaagcgatcagctattctgtccctgatgtttatcgccggactgcttgcggtgcccggggtgctcaacgcccaggtcgagaagcgtgtcgaagtatccaaagcctatgtgccgagcgtggagcatgcgacgaaacttgccgtgcgccccaatatggtcgatacggcggccatacagccggaaatcgactattcgatcacgccgctcacgctcgaaacgcagctcgccacgcgcccgatccgtcctgcgacgatcacctattgggagttcgaccgtccgctgcctttttacctgaaggccggagcgggttatccgctcaattcggcgctcgatctgtatgtttcgacgcagaatcccgacatcggctatgcgttgggctatatcaaccacgacggacggtacggacggattccctatacgcccgacggggaccatagcgccctgtggatggacaatcgggtgggtgtcgccgccgggaaatacatcgggcgtcatgtgctggagggcgaggtgagctaccggaaccggatcatcgaccgttacggccttttccccgatccggactttccgactttcgacaacggaaatcgccgcgtgatcggcgatttgcagggaaagatacggatcggcgacgatttcaacgacctctcgcggacgaatttcaatgtcgaggtcacggcgggcaactggtggaatccgctggattcgaaactctatctggaggataatgtcgttccggtgttggattatccgtacgaaaacgagtggaatttgggggtagatgccgccgttggacgacgtttcggccgccatacgctcgtcttccgggccggattcgagggccggtggggtggcgaccgcaagggcgaatcggtttgggccgctccttctgactattacaaccggacctattcgggagcgttccgttatgcctatcgtgcccggtcggtcgatatggagttcggtttggattactaccgggacgatgtggcggggcgcgatgcggcgaattatttcattccctacgctcacttgcgtttcgatctgggcggcggcggtttcgtaccttatgtcgagttggacggaaccctgaagcacaacgatatgcgggagcttatggaaaccaatctttattacgtgcctcgttatacggacccgatgccccgcaatacggtggactattcggtccgtgtcggtgtgagcgggcgtctcgtcgaggataagctgatttaccgattgttcgtcggctattctttcatcgagaatcataacttttggtattgctatacgccgactacccggtatgaggggttcagtctggtacagggacggctgaatgtcatgtcgctcaacggtgagctggagttccgtccggtgagcaatttcacgttctccatcggcgggcggggcctgacctataccgagcatcagaccttgagcatcggcctgccggagttcgagggtacgatccgggcccgctatcatcatcgtaagttctcggtcggcctcgttttcgacctgcagtccaaccgctatatttcgcgagtgattccgtggttcccgaacgacgggatcgtggggaatatgcgcattccctatacggtagatctggggttgaatgtcgattggtacgcgtccaagcgggtaacggtattcgccgaaggtcacaatctttgcaaccgccggatttacgactggagtacgtttccgcagtacagcgccggatttacggcaggtgtgaagttgagtttttagcggatcgacccgatatgaaaaacggccggtaacataccggccgttttttatggagtacgatttttactccaggtttttccggactccgtccagaaaccgcttcatctccccgctgtcctttttgtcgatgatcttcgacaggcgggtcagcgtggcgacgatgttgtcgatctgtgcgggcgtcttggggttgaagaggatttccgtcagcaggtagtcgtcttcggagagcagtccgcgggcgatggccatgtgtttcttgaaggtggtgccgggggcatcctggtgcttcatgatggaggcgaatacgagagtcgaggcgaacggcaccgagagggagtaggccacaacttcgtcgtgcccctcgaaggtgtattcgcagacgttgagcttcagcgaaccgtagaggtccttgaagaagattttgcccatgtggtccgactccttgatgatgatggcgttttcggtttgcaggttgcccaggttggcgaacgtggggccgaacatcgggtgggtcgaaacgtaccggaatcccgatttctcataaaattcctgcaacccggtctttaccgaggcgatgtcggagatgatacactctttcggcagatagggaaatacctcctcgaatgcctggagcgtggcgttcagcgttacgcagttgataagcagttcaggccggaagtcggcgatctcttcgggcgaggtgaagcgctgggcattgtagatgaatcgcatccgccgagggtctttttcgaggacggctacgtcgtggttgaaactcaacagatcggtgaaaaaggagcccatctttcccgctcccaaaatcagtatgcgcatatatcggtttgtttatgttttttgatgatccgggcggcatgggaccgcccggggattgttctatttcattcttcgttttttcgctcggcagaggccgtcggcaacttccgtccccgtttgccgaaaacattgaatcgcttcttcgttttcttcgcacggcataatccgaataaattcggtgctgtcttcgcttatcgggaacgtcgttatttcattatttccatctggacctttaccgactcttcgtggatcgccttcatgatttccgaaatgaattccgggtcgaggtcgagcgattgccccattttgccgcgtttgtccaggatttcatcgtaacgcttattttgcaggatgggcatgttgtgctccttcttgtaggtgccgatctcctgcgagatgtgcatccgcttggcgaggaggctcaacagttgctcatcgacctcgtcgatctggcggcgcaggatgctgatgttctccgtggtttgggcattgtcgcgcaccacgagcagttgcagcgtgtagtccagcacttcgggcgtcacctgctgcgccgcatcgctcagcgcactgtcgggatcgcagtgggattcgatgataagtccgtcgaagttcaggtcgagcgcctgctgcgagataggagctaccagttcgcgtttaccgccgatgtggctcgggtcgcagaagatggtgaggttggggtacctgcggcgaagttcgatcggaatatgccagagcggagcgttgcggtagatttttttctcgtaggagctgaatccccggtggatgacgcccagccgtcggagtccggcgttgtagagccgttcgatcgcgccgacccacagttccaggtcgggattgacggggttttttaccagaatggggatatctacgcctttcaatgcgtcggccagctcctgcatggcgaaggggttggtgacggtgcgggcaccgacccagaggatgtcgatgccggctttcagggcttcgaaaacatgggcgggggtggcgacctcggtggctaccagcatgccggtttcctgcttgacctgcttcatccagggaaggccttcgacgccgatgccttcgaagccgcccggcttggtgcggggtttccagataccggcccggaagatctttacgccccgggcggccagttcggaggcggttttgagtacctgttcacggctctccgcgctgcaagggcctgcgataatcatcggacgtttgggatccacgcccggaaaagtgagcggttctatttccattttcattgtcgttgttgattttgcgatcgccggctgtaaccggcgaatccggtctgtttatattctgtttactgattctgttttgttcgggtcgtcgtgatccggtcgagtgcctcctgcaacatctcctcgttgcagcagagcgagatgcggatgtagttccgcccttccgagccgaagatgaagcccggagtgacgaagactcgcgactggtacagcacccggttgcagatggcttccccgacaccgttcgggcactccccggcagccgtgagttgcgccgcgagggtatcgttcacccgtccccagaggaacattcccacctggtcgtcgcggacatcgcagccgagggtttccagaatccgggccgccagtgcgcgtcggcggcgatatacctcgttcatccgttggtaccagctgtcgggggctttcagcgcttcgacggcggccagttgcatcgggcggaacatcccggagtccatgttgctcttcacgcgcaggatccactccaggaaccgggaattggtcgccaccattccgatacgccagccgggcatgttgaaggttttactcatggagttgagttcgatgcagatctctttggctcccggtacgctcaaaatacttaacgggcggtcgttcaggatgaagctgtacgggttatcgtggcagatcacgatgttgtgcctgcggccgaaggcgacgagtttttcgaacagctctcgcgaaccgttggctcccgtaggcatgttggggtagttgcaccacatcagtttcacaccggacaggtccattttctccagcgcttcgaaatcgggctgccagtcgttctcttctttcagggcgtagggcaggatgcgggcgccggtgagcttcgacaccgaggcgtaggtcggatagcccggattgggtatgagtaccccgtcgccttcgttcaggaaggccagcgaaatgtgcatcacaccctccttgctgccgatcaggggcaggatttcgttggcagggtccaggtccacgccgtaccatctcttataccaccgggcgaactccgcacgcagttccggaatacctacgtaaggttggtacccgtgcgtgtcgggccgtgctgccgcctggcagagcgcctgcacggtttcggccgacgggggcaggtccgggctgccgatccccaggttgatgacgcgtgtgccggattcgttcatccgggccacctctttcagtttcacggagaagtagtactcctcgacgttttccatccggcgggccggggtgacggtcggttttgccggtttcgtttcttcggagccgccaagctccgcaggttgttgttttttcatactgaaaacaaaaaagctcccgcctcaaggcaggagctatgatctaaattcgtaattctgtcgatcgaactttacaacacgcaaactcccgcctttactcggcccgaataaaggtaataataataggagtatgtaaactgaacgtgttgcatatcgtttttgtcgtcgaatatccatccaggatatttaacgggacaaatgtatcgcatttttcggaaaatgacaaaatttttttcgctttttttatttcgggcataaaattcctaaatttgtcgggacaaacaattcgaataaacgtgagcaatcttcatatatcatccgatttcagcggtttggatgccttgattccgcagggccgacgggttttcgtcgttatcgacagtaacctgaagccctttttcggccttttcgaacggtatgaactcattccgatccagacctccgagaaggttaaaaccttcgctacggtagaatatattatcgaacagttgctggagcggggagccgaccggagctcgtttctcgtgggcgtgggcggcggcatcacgaccgacctctgcggtttcgcggcgtcggtttacaaacggggtattcggttcggtttcgtacctacgacgctgctggcgcaggtggacgcttcgatcgggggtaagaacggcgtgaatttccatgcctataagaatatggtcggtacgatcacccagcctgaatggatctatatctgcaccgatgcgctgcggacgctttcgccccgggagttccgggccggaatcgccgaagtcctgaagactttcatcctgttcgatgcggaatactatcgcaaggccgtggattatttcgcccggatggaggcccacttgcggaaagcgggaacctgttgcgggggcgaatgtgtgtacgggcaggaggagcttaccgaaatcattcgcaaaacggcgttatacaagtgtgccgtagtggagcgggatgctttcgagaagggggagcggcgcttgctgaatctggggcataccttcgctcacgccatcgagaaaaattgtccgatcatgcacggcgaagccgtggcgatcggtctggtgctggctgccggggtgtccgaacggctgggactcgccccggcgggactggcggtcggtctggcggaggatttgaagaaggtcgggcttcccacccagtcgcccgtagctatcggtgttttgctggaagcgttggaaaaagataagaaggtggagggcgatgccattcatttcatcctgcctcgtgcggtgggggaggtggtggatcgtgcgattccgttaaaacagttggaggaggtcgcccgtgatctgcgttagcgtacaggaaaagagtttcggggattgccgggcgatcctcgaatcgtgtgaaatggccgaactccgggcggacctttgccgtctttcggtcgaagaggtcgagcggctcgtggagattcggccgaacctgattgccacctgccggattgcgaactcttccgaggcgttcgcccgcgagcagctcgcggcggcgatccgcagaggggcgcgttatgtcgatatagagatcgaagcgcccgacgagcatctggaatatattcgtacgctcgcccgcgagtacgggtgccggctgatcgtttcgttccacgatttcgagggaactccctccctcgacgagctgaaggggatcgcccggctgtgtcgcacgaagggggccgatctggtgaagatcgtcacgacggcccggaatatttcggatgccgcccgtacgatgcgtttgtatgacctgcaagccgacggagcgcttttcgagggtgccgccgctgcggagcgtccgcagttggtcgctttttcgatgggcgaagccgggaaattcacccgtctgctctgcctgaagctgggggcgccttatacgtatgtttcagctggagcatccaacgccacggcgtcggggcaatatacccgcgaggagatggagcggctgctttcggccgaaaattatcctttcgagggatttcgcgagttccgtcggacgacggttgccgttccttgttccaagagcgtggcccagcgggctgtgctggctgctgcgctggctgcgggagagagccggctcgccaattacgccccttgcaacgatatagtcggagccgtcgaggtcatccggggtatgggctgccggattgcgtcggacggtacgacgctgcatatcgagggtgtcggagcggagcgcttgggacgttgcacgaagatcgaaaccggcgaatcggggctgctcacgcggctgttgactccgctggcatcccatatttccgctttgaacggcggtgccccggtggaaatttccgggcatggcagtattctgaagcgcaatctgcacgaggcggtcgccgcactgcgcgaagccggcgtgcattgttctgcccgtgaggaggggtatcttccgtttcggatcgagggcggtattacccgtcgtgagatctccttttcggggcgggagagttcgcagaccgtatcgggtttcctgatgactttgccgttgttgcaggatgcgaccgtgctgacggtaaccgagccgtcgagcattccctacctggagcttactttgcggacgctgactcggttcggtgtccgactcaacagggaggcgttttacgacggggtgtgtggcgggacgccttcgaaaatcgtattttcggtaccgggcaggcaggagtaccgtccttcggacgtcttcctggaggcggattggagttctgccgcctatttcgcggtggccggagccgtcgcttcgtcgctggggcggaccgagggaattacgctgcgcaatatgcggctcgattcgctgcaggccgatgaaaagatactcgacatcttgcgttcgtgcggtgccgatgtgagcgtcgcgcctgcggacgcatccgcaaggggcgatatgccgggagatttgcagaacatctccgttactgcgaccggccggcggctgaaggctttcgaggtcgatgccacgcattgccccgatctgttcccgatccttgcggtgctggctgcccattgcgacggtacgagccgtatcgcgggtgtcggacgtctgacgcagaaggagagcaatcgggccgaaacgatctatgccgagttccggacgctgggggcgcggatcgacatccggggcgacgagatgttcgttacgggcgggccgttgcatggaggagatgtccgttcgcacaacgaccaccggattgccatgagcctgatcgtcgccgggttgttcacgccggagccggtgcggctggacgacgtgaagtgcatcgacaagtcgtttccttcgttcctcgatctgctcgcccggcaggagtagcggggcgggcagatggtatttccgttccggcggaaagaacgctttccgtgcggcgaagcgcggaaacgatgaacgggccggacgactgaagtaaactcgaagaaatttaattggctatgaattcatacggaacaaaattcagactctcgattttcggggagtcgcacggtccgctgatcggcgtggtgctcgacggcgtgcctgcgggcatgccgctttcgcgcgaggatttcctcgcggatctcgaccgtcgccgcagcggtgcgaagggaagcacgccccgcaaggagagcgatttgccggagatcgtaagcggcgtctgcgacgggcacactacgggtgctccgctcacgatcgtattccgcaacagcaatacccgttcgggcgactattcggactttcgcgcgacgccccgtccgggccatgccgatttcgtggcggaacggaaataccgtgccttcaacgatctgcggggcggcggccatttttcggggcggctgacgctgacgctggtggcggccggagtcgtggccaagaagatgatcggcccgatcgaaatccgggcccggatcaccgagctgggcggtattccccgcgagcggctgaattgcgagccggggagggagttgggcgccgagggtgccccgacgctctgggacgagctgatcgaccgcacgctccgggagttggattccgtaggcggggtcatcgagtgtacctgcgacaaggtgcccgtcggattgggcgagccgttcttcgattcgctcgaatcgcaattggctcacctggcattttcgattccggcggtgcggggcatcgagttcggcgacggattcgccgcagcccgtatgaaaggttcggagcataacgactgttttgtgaacggagagggaaaaaccgctaccaacggggcgggcggaatcaacggtggtatctcgaacggcaatcccgtggtgttccgcgtcgctgtcaaacctacttccagcatcgcgaagaaacaatatacgttcaattttgcgacgggacggatggaagagttcgtcgtcaaagggcggcacgacgcctgcatcgccttgcgctgtccggtcgtggtggaggcgatcgctgcgatcgcgctggctaacaactgatcgttttttgccgaaaatcaattgatttttagtaagtcggatatttgcagcgctgaatattattcgtattataatatttgtcccgcagaggtttcgttgctcgattcgatgctgaaacgaaaggaatacagcaataccgggaaatatgtatttcccggtattgcttatgattgttccctgaattggtatcgacggtttttgaagtcggccggaaatgggcgggtacacaaaaaaagggtaagctacttatatcgcaccgctacgaccacatacccttgcttgattcctcacctgggggagtctgtgggagctggtcgtataagacttaccccagcacaaaagtacgaattttttgtatctttgcaaagaaaaaaggaactatctgcgattttgtcgctgtttttcgagagccggatgccgaaaaggctgcctggatgtgtctcggagggcggtgcggggagagttaatgaatgaagagaatgacggcgaaaaaaagattgcttgtcgtgtttattgctgcggttgcagtcggggcaacggtggctttggttttcatctttcagtttttcggagatgccgtccgggagcggagcgacctttatataagcgcccgcacggactacccggggctgctcgactctctgcgtccccgtacggaccatcactgggcttttgaccggtatgccggccgtctggagctggagcgctccttcaaaccggggcactacgtactggaaccgggaatgaacgtcgtcgaaatcgcccggatgctcaaactggggatgcagacgcccgtgcgcgttacgctcaactatgcccgtacccgcgcttttctcgcttcgcggctggcccgccagctcgatgccgattctgcggagctgatgcgggcgctgaccgacccgcagctcgcccgggaggtcgggaccgacagcctgcagctcttttcgatctttatccccaatacttatgaattttattggacggtttcgcccgaggatttcgtgcgccgcatgcgcaaggagtacgaccgtttctggactccggagcgggatgccgcccgccgacgcagcggtttgagccgggacgaggtgatgacgctggcttcgatcgtcaccgaagagaccaacaaggccgacgaaatgccccgtgtggcgggagtctatatcaaccgcctgcggaaagggatgcccttgcaggcagatccgacggtcaaatatgcgttgcaggatttttcgcttcgccggattctgcacaagcacttgagaaccccttcgccgtataacacctacctgaacaaggggctgccgccgtcgccgatcgcgatgccttcggtcgctgcgatcgatggggtgctgaacttcgagaaccacgactatctcttcttctgtgcccgcccgactttcgacggttatcacagtttcgcccgcacgtacggcgaacatttggctaatgcccgggcttatagtgcggagttgaatcgtcggaatattaaataatttgtctatatttgccctccctatgttggttaaaatctataccgagaatccttccgagaaggagatcgaccgggtggtgaacctgctcgaaagggacggcgtggtgatctatccgaccgacagcgtctatgccttcggctgctcgatccgttcggcgaaggccgtcgagcggctgcgccggatcaaggggaaggatctcacgacgttttccgtcgtgttcgattcgctcgggcggattgccgactattgccgagtggataacgcccagttccggttgctgaaacaaaatctgccggggcctttcaccttcctgctggatgcatcgtcgcgtatgccgcacaaggcactcgaacggcgccgtaccatcgggatccgcattccggacaatttgattcctcgggccatcgtcgagcggttgggagctccgctgctgacctcttccgtgctggatgacgaggagaccgaatatatgaccgatccggagttgatccacgagcggtatggccgggacgtagagctggtgatcgatggaggtgcgggcgatgcggtgccgacgaccgtcgtagatctgacgggcggtgagccggagattttgcgggaaggtaaaggtatattgcgggaataaacatatgctaaaaatagaagaagaatgacaaaattcaaattctggaacgaggtctgcaagtacggagcgatcatcggactggtcatgtccgtggctttcgttatagagcagtccttgatgttgtcgggatggttttcgacgatggggctggtgtggatcttggccgcagtcgtttatatcgcgctgctttaccgtttcgccaagcgccgccgtgaacagtacggtcacgaacagggatttcctttgagccgcgggctgggtttcattctggccctgattctgtcgtcggccctgatcaagggggtggtggaatacctctatcgcagtgttttcatcggatattcggagtatatcgaccgatatacttccgcattgatccggttcgccgaggacggaaaacttcctgcgtcgatggagggcgtattcgccgaaatgctgaaaaccatacaggaggcgccggagccttccattctggctaccgtatgggcttcgatctggggcaacctgatcgtcggcctcgtcctggggcttattttggccggtatcctggcgcgtgcaccccggcctttcggtcctcaatccgaagagtagaagaacgatggatgctacgctcgacatatcggtcgtcgttccgctttacaacgaggaagagtccctgccggagctggtcgaatggatcgaccgcgtggctcgcggcgagggtttgtcctacgaggtgatcctggtggacgacggttccggcgatggttcgtggcgcgtgatcgagagtctgcacgagcggtttgcggcggtgcgggggatcaagttcgctcgcaactacggcaaatccgccgctctgtattgcggtttcgccgaagcacgcggcgaggtggttttcacgatggacgccgacttgcaggactcgccggacgagattccggctctgcggcatatggtcctcgacgaggggtacgatctggtgtcgggctggaaaaagaagcgtcacgacccggcggggaagcggtggccgagcaagtttttcaactggacggcccgcatcgtttcgggaatccgactgcatgatttcaactgcggactgaaggcctaccgccgccgggtggtcaaggcgatcgaagtctatggcgagatgcatcgttatattccgattctggcaaaacaggccggattcaagcggatcggcgagaaggtcgtcgagcatcgcgcccgcaagtacggtcattcgaaattcggtatggagcggatggtgaaagggtatctggatctcattacggtttcgtttctctcgcgtttcggccgttcgccgatgtactttttcggcagcctgggaacgctgatgttccttttcggcggctgtacgacggcatgggtgatcggtgccaaattgtataaacagtgccatgacctgcctgtgcgggccgtaacggatcagccgcttttctacctttcgctgctggccgtcgtgctcggcgtgcagttgttcctggcgggattcctgggcgagttgatcgaccggaatgccgcagaccgtaataaatacctgatcgaaaaaacattggataatcaataaacctcgcagagcctgtgattttcggcaggattcgaagaggttcgcataaacaaaatagaagttatatgattcaacgtattcagactctgtatctgttgctggtcgtcgtactgacgggattggcgctgtggctgccgctggccgatttcaccgtcggggcggacacttgtacactgaccgctttcggcctgaaggatgccgccggtatcacgttgttgccgacggtgtatctgggggttgttctggctgccacctgtctgttgccgctggtgacgattttccttttcaagcgccgcctggtgcagatccggttatgtgccgtcgagttggtgctcctcgtcggtgccggagcgatgatgggaatctatttctacctttgtaaccgttacttcgcggaaagtgaattttactctcatactcttaaaatttcgctcgttttcccgctggtctgcctggttttcgacttgctggctttgcgggcgatcttccgggacgaaaagctggtgcggtcgctcgaccggattcgttgaccggacgtatttctcggaaaaaaggcgtgcggtcaaaactgcacgccttttgcgcttattttggcggagagaacacggtttggtgggttttttgatacgaaataaaaatccgttgtgttgttatattcgatttaatggcattgtaatatgaaaatagtatttaacccattggtaaaacaggaaaaaatagtatttttgcaaaaagtttaagaataaatactttgtgtaaagtattataaaacgaagttatttttaacctatttttatatcactctaaaatttaattgtttatgaaaaagagtagcatttggaaattgctcttcagtgcattgaccgtgttcgccgtagtggtgttcgcgggatgtaccgacgacaatgacgacatgggtgctccctatctgaacgtcacgccggagaacctgacgttcgatgcggagggacagcccgcagatgagtacaacggtacttttatcgttgaaacgaaccgtccctggcgtgctatcgtcgaggacgaacagacttgggtgcgcctttcggctaccgaaggcgagggcgacgctgccgtgaccgttacggtacccgcttcgaacatcggtcaatcggccaaggtgactttcgaggtttacaactcctacggcgcattgattcagaaggatgtcaatgtgcttcagggcgaagtggtgccgcccgatccgggtgaggctacggccattaccattcccgagctgatcgcacagatgactgatacggaggctccggtggatgccaatgcagatcgctatctggacgctgtggtgatgaacgatgtggccggtgccaattataccttcaacaacctgatcctcgctaccgagaatgcgacggaggccggtaacggcatcacgctctacggcagtcaggtagaaccttcgacgctcggtctgaacaagggtgacaaggtgcgcgtaaccctttataaaggacttgccaaggtggtaaattacagtggtatgtacgaagtgacgggcgctaaggaagcgacttggtgcaaggtcgagaagaccggtacggtgacttcgattcccacggcgacgatcgctgctgcggatctggcgaaatatcagggtatggccgtgacgatcgccaatgcgtcggttgcccaggcaggtgtttgggcgagcgccagcgcactctcttcgcatactttcactgccgatggagccaatttcaccgtattctgcaagcagagcgatgaaaagaacccgagcgtgttcctcgatgttccttacaaggccgctacgggtaatatctccggtctggctgccgtatataagaataattcccagctcgttccgcgcaatctggacgacgtggccgctttcagcgacagctcgaccccgatgattacgggggtaactccggccagcgtttcgattccggcaatcggcggcaatgaaacgattattgtttcggttgccaataagggtgaaaatgtgcttagcgttagcggcctgagcgggttgcttgaagctactgtcgataatgccaacaatatggtgacagtaacggcgcagcccaataccggcgctgttcagaatcagacgctgacgatcgctattgccggtggcaacagcgtgacggtgcctgtcacactcctcggtgtcggaggtggaggaaccggtgaggtcgttgcgttctcgatcacggatattaaggcggataatgcggatctcccgaccaatggttacggttcgcaggttgtcgctacgcccagtacctgggttagttggaccgttggcggtatcgagttcacgggtgtgaaaatctgtgaatcgcccgcttccaacggctcgatcattcagatgcagggtaatgactccgatgcggctaaacaggcgaagctgcaaaacgtgacgccgatcgacgggatgtcgaagatcaagatcgttttccggtcgtatccgaataagagtggcagctactacaacccgggatatacgatgaccgttgccggggctgctcaaactcctgtggaaacatacacggataagagcggttacagagagtatgtacatgagtacgatctggccggtttgggtgctgattcctttgtgctcgacaataataaggtcggagccttgtatatcgaatcgttcgagattaccaaatagtttttaatatgccggataccgactcttggagggatcatcccctccaagagtttggtttctcggatagttttttatagtttaccgatgatgtcgatgttcagatattgtgagaagggatggaaatggctgttcctgacgatgattgcgctctctgtcgtagcttgcggcgacgatacggacgatttttggggttctgccgtatggcggacctcttcgacggtcggagctgcggagggttcggccgccatacagattgagggacctgtcggcgccggatggcgtgccgaaatcaaggacggaggtgcttggtgctcgttcaggctcaacgatccgacggtcctcgtgaaggagggcaccgtacagagttcgaacatcagcaatatcctggacgtttattatacgcggaataccgggagcggggaacgttcggcgaccatcgaattcgaatttttcggcggtgagccgcaggtgctcgtgctgacgcagttttcggcctcttcgaccaacgatccctacgatgaaggtcatgcgaaggcctgggccgaattgccggaaaagcgagtcgatgagaatttcgtttacgtcagccacttcgcttcgctcaataaccgcaccgtgcgcaactattcgttctgctacgacaaaacgctccatgtggcgcattgggtggcttatccgctgcattcggtatatagggggtcgatagaccgtaccgacgattttcagtacgatccgaaggtcgattatccctggcagcccaacctcgcggccggttcctatcggggcagttacgaccggggacatcagctcccttcggcggaccgtacggctacgcgggagttgaatctccagacgttttatgcgaccaatatgacgccgcagctcaaccggctcaaccaggatatgtgggccaatctcgaagccaaggtgcgtgcgcagatatgcaacgacacgctttatgtggtgaccggttgctattatgccaataccaatacgacgacgaccgaccgtgacgggaaagtttgtccggtcccgacgaattatttcaaggtattgcttcgcacgcgcaccggtacgaccggcaaacgtatcgcggattgttcggccgatgaattgaaggcgatcggattttgggtggatcagaagagctacggcgatattcagccgcctgcgtccatttgcatgagcgtggcggagattgaaaagaagaccggctttacgttctttcccaatattcccgagtcggctgcggaatccgtaaaggcacaaaactctccgagccaatggggaatccaaaactaatttgacttatgaaaaaacgactgatttttacaggactactggccttactgttcgcagcctgctgtttcgcgcagaaaccgtacaaggtggtcttttacaacttggagaactttttcgatacgatcaacgatcccgaggtcaatgacgacgaattcacgccggaaggacctaaaaaatggaattctgtcaagtatgcgaagaagttgggcaataccgaaaaggtgcttttcgacattgccggtatcgataaggattatccgatcgtgatcggcgtatcggaggtggagaaccgctcggtgctcgaagatatcatcgctacgccgaagatggctccgggcaattaccggatttcgcactacgactctcccgaagctcgcggtgtggacgtcgcttttatgtaccgtcccgatgtcttcaagctggagggcagcgcaccgatccgcacgcagattccttcgcttccgaatttcaaaacccgcgatatttcgaccatgtggggtacgatcgacggcgaaccgttcttcttcatggtggctcactggccttcgcgtctgggcggcaaggacgcttcggagttcaagcgtatcgccgtcggcgaacagatgcgtcgaatcgccgactctgtcctgaaggtcaatcctgcgaccaagatcgtggcgatgggcgacttcaacgacgatccgaccgatccgagcatgttggaggggctgaatgccaaacccaaggtcaaggatcttcagccgggcgatttcttcagtccgttccacgccgtgcttcgtgccggtatgggaacgctggcttacggcgacgcctggaatctcttcgacaatatcgtagtgtcggaaaacctggtcaatgcgaagcccggcgagttgcgtctggtacgggctccgggatcgaagtactacgggaatgtcttcaagcgtaactatatgatccagcgagaggggcagttcaaaggctatcctttgcgcacgtacgtcggaaacaatttccagggcggttacagcgaccacttccccgtttatatctacatcggtaaataaataccttaacttgaaaggatatgaaaataaaaagtttactaatttttgtatttaccctgatgtcgctgaccgcgttcgctcagagcggcggtatcaagggtaaggtcgtttcccgcgagggacgtgtcgcggtggacggggtgaaggtttcggtcactcccggagaaatgactgccacgaccgacggccgaggtggtttcgtgatcgagaatgtcgagcccggcgaatatacgttgcagttcgaggctcccgaattcgagcctttgacgctcgtggtgcgcgtggacaagatggtgcgcgacatcaatacggtgattctggtccccgaagtgctttcgaccgtaatggacgattcgatcttcgcagagttcgacaccgagagcggcaacgatgcgcagtcgctgccttcgtccctttcggcttcgaaggacgtttttaacaacatcgcttcctaccggttcagcgagatgcgtttcaacgtgcgtggttacgattcgcagtattcggacgtttacctgaacggtattcgcttcaacgacgctatgacgggctatacgccctggtcgttgtggagcggtctgaacgacgctacgcgcaaccaggagatcaccaacggttcggtcatgtcggattacggcgtgggtagcatcggcggtacgaccaacatcaacgcccgtgcttcgcaggtgcgccagggacttcgcgtgagtctggtgaacgccaattcgatgtatcgcttccgtgccatggtgacctatggttcgggtctgctggacaacggctggtcctatgcgttgtcggtatctacccgtcagggcggcaactcctacgtggacggcgtctattacaactcctacggatatttcgcttcggccgagaagattttcaattcgcgtcaccggttgggcttcacgattatgggtgctcccaccgagcgcggtgcgcagcaggcttccacgcaggaggcttacgatctggtcggcaacaactattacaaccccaactggggctaccaggacggcaagatgcgtaatgcgcgcgtgcgtaacagccacgagccgatcgctatgatcaactatacgttcgatcccaatgagcatacccagttcaacctggccacttcgttccgtttcggtaagaacggttattcggcgctgacgtggtacgacggtgcagacccccgtcccgattattaccgctatatgccgagctacaagttgctgaacgctaccgacctggaggccgcttcgatggctgcggccagtctggcggatcagtggatgcgcaacgtgggtaatatccgccacttcgactgggacgaaatgtaccagaccaacatgaatttccgcaatgccgaggatgaagcgatatacggtcccggcgcccgttcgaactatatcatcgaggagcgccataccgaccagttggactggaacctcgccgcgcagatcagccgaatctataaggataactcccgtctgacggccggagccaacgtccgcatcaaccgcacgtggtactacgacgaggtgaaggatctgctcggcggcgactattacgtggacgtcgataaattcgcacagcgcgacttcggcgatccgatcatggcgcagaacgatatggattattataaccagtacggtcatgcaagagccgtcagagagggcgacaagttcagctacaactacaaggcgcatctgcgttccggcggtgtatgggctacttatgccacccgtttcggcggtttcggcatgaagttgggcgccgagctcggcggactttcgatgtggcgcgaaggtctttggcgcaagggtctcttcccggataattcgaagggcaaatcggagaaactcgaatatttcgtatataaggccaaaggtaatttcgactatgtcatcaatgccaaccatactttcgaactcaacgccgtggcgatgcagaatgctcctgcgttccagtcggccttcgtttcgccccgtacgcgtaattcggtaactccggggcttacgacggagaaggtttacggcatcgacgcttcgtacaacctgcgttacggcgattataaactccgtgtttccggttattatacgaaggtgaacgaccgttcgaaggtgatctccttctacgatgacgtgctgaagacctataccaatttcgccttgagcggtatcgacgagcagtatttcggtctggaagtcgccgcttcgattccgatctacaacggtttgtctttgaacggtgcgatcagttggggtcagtacacttacacgtcgaatcccaattacgtgcagattgccgacaacagcgccgagccgctgaactccggtacggtctattggaaggatatgcgcgtggagagcactccgcagacggctatgaatatcggtttgtcgtaccgcggtcctcataacatctacgcatcgatcgatctgaactattacaacaatatgtatctgtcgatgaacccgctttaccgtacggacgaggtgctgttgcctacgatgacggacgaacagatccgggagctgcgcagtcaggagaagttcgattcggcttacaccttgagtgcgagcatcggtaagaatttctacattcagcgtcgttatacgctcggcttcagtttgcaggtgaataacatcctgaacaaccagaatatcaagaccggcggttacgagcagatgcgtgtgcagggcattaagaccggcaaggagatcacttcctaccagaagttcgctcccaagtatttctacctgttcggcaccacttactacctgaatgtctatttccgtttctaacggcttaacgaattaatattgtgaagaatatgaatagaatagcaaccatatttctggcggtgacagcaagtttgttcttcgtcggctgttataacgatttcgatacgccggctcctgcgaaggtatggacggatgcggacttcagcgacagtaaaatcatttcgatcaaggagctgaaggatattttcgaggaggcttatcccgggaccagcggtatcggccagtcgctgaccattaccgacgacttggtgattcggggcaaagtcatttccagcgaccaggccggtaacgtctataagtcgatgtacctgtacgatgaaagctgccagtcggccatcgaaatcaaagtgacttcgggatattacattacctatgctcccggtcgcctggtttatatccgtttgcagggtctggtgctgggaaattaccgcacgatgctcagcgtgggtgtcgcatcgaccaattctaattatgccaacggcaatatggaggaccgcaataccttggaagagcatgtcaagctcggcgaattgatcggcttgacggcggccgatactttggtggttactcccgcttcctattcgacgctgacggatgagtcgctggggcgtttgatccgtttcgaagggttggaaagcaagttcggcaaggccggctgggggtataaaaatacattccccaactacttcgccaacagtacctcctacgatgtgaattctccgggttggaccgatatcaacgattgggctacctgggcgacgaagcgggtcgatgagcttacgcacgagagtacgttctattatggctctgcctggttcacctatggcgacatcaacaccctcgcaggcaattatgtcgtacgttcgagcggttattgccgtttccgtgacgagaaaatacctgcggacggttccgtggtgaacattaccgcgatctataccaagttttcgcagggcagcgatgcgacggcggcctatcagttgttgctgaacaaggcgtccgacgtggtcgtgacttcgaaatagccgcagtttgcagttgaaatcgccgggcctcatctttttgatgaggcccgttttttattctttatgcggttgcgattccgctcgtattgtccgcgaaggagctgcctccggtcttatgaggcataaatttcagggaagagcagtgcgcggaagtcggagcgcatgatcttgtcccgttactgtttttcctgcctgccggggagccggttgccgtatgtccgaaaaaagcaagacattgttcggatcgttcttttgctgcaagttggcaggctgtcgcaccgggggacctgctgtccgcataatgcgattccgactgccgggaaggggcaacgtgatcggcagagagctgtccgcaaacggaagagcgtcgccgaaacggagaattcgatgcgaagtgcggaatcggaaagcatggcggggtatgacataacgtcgttcgtggagtttggttccgcgtctgttttccggaaacggatacgattcctgtgcgtggacgatcttcctgcattgcagataggagcggaaaaggaaacatccgtgaacaggagtccgaaaccaaagaaaacccccgaaccggtgagagttcgggggtagtagtgaataaaacctgttattgatgattattcatctgcttcgggttgagcttcgggacgcatggtgacctgtattacgttgccgctgtcgaggagcttcttcgccaggtcgcggatctcgtcgtaagtgatgctgttcagggtcttttcgtagtcggcgagcagattctgcttgtgacggttgtagtcgtcgatcaacccgaaccaggtgccgttattttcgagcgtattcttgaattgcttgaccaagtattcgcgggagtcgttgatgtctttggcttccggtccttcagtcgcgattttctcgatttcatcgaaaacgatcggcacgagttcgtcggccatctcctcgttggtgtcgaactgtatttgcaggagggcctgtttttcgggacgatacgagagagtatagcttacctgtactccgtacgtgccgcctttctcctcgcggatggatttcaggtaacggttgttcagggccatgttaagcagcaacatggtttgcttgttgcgcagcgtgtagtccgcatcgctcgagaagagcaggaactccgaaactttcggctgcagcatcggggtgcggaagtcgttcacgaccttgcctttggctgtgcggagtttgtcgtccgtgaacttaagcacgtgtttcgaggtgggaatcgaaccgatatatttctcgaccaacggcttcaacgtttccaaatccacgttgcctacgaaggtgaacgtaaagctgttcgcacccgggtagagcgttttgaaggttttcggcagattttcgaacgagatgctttccagggcctcgatcgtcagcggctgctgacgcggattgtcgctgtaaagcgttttgatcgtttctatctgcatgatgtagtcgggattcgaggtcaggttctggacgtatgccttgtagctgtccatcgtcgtgttgaaatcctcctccgagaagcggggacttgtgaagttctggtagagcagttggagcatcgtttcgatgtctttgggcgagcagtaaccgctcataccgttgctgtagttattgacgtacaggttgattccggctttcttgcctgcgagctgcttgttcagttcgattgcagagaatttgcccacccccgactgggccgcgatgaccggaaggaattcaccctccttcacctcagtatcggcaagctgcgacatcccgccgtcagcctgtacctgcagcaggacttcgtccgccttgagttgggtcggtttgacgatgatcttcacaccgttcttgagaatccattcggtcgttccgagatcctcgttgtatgcggtctttttcacgggcgagcctttcagcttgatatctgcggggatcagaggctcgctgacggtattgtcctggtaagcctcgacgtcggatgccatgacctcgctgcggatggccagaagttcggcttcggtcggctcggtcagtccctctttcttcggtacttcgacggtgataacctggttttcaggtgtcagaagttgttttacccaagcattcacatcgtcgagggtcaatgcttcgaggtattgtttgtcgaggttgtactgcgtttcggcatctgccatagcggtatttttcttgtaattcgccaggtaggtttgaacatattgtccgttcgtaaggtcgttccgattggcataggtagcctcggcctgacgcaggaattcagctttcgtacgatcgaattcgctctgtgtaaagccgtaacgcttcatcttttccatctcttcgaggatagctttgtaaccgcagagcaactctccgtctcgagtttgtacggcgaccatcgtgagatcttgggtcggattcactcccagtatgttgcctgaatccatcccggcactcaggaacggagcatcgggctgcatggcgatttcattcatgcgatcgttcgccatggcacttgtgtaggagttgagtacatcgtacatttggctaattatcaggttgttgtattgcttggggagagcgggtcgtttgatgaagagctgcatgaccgaagccgtcatttcgggatcggaaaagatgctgacgatgggttcttcgttttcaggaactaggtaagcctctttctgcggggcatctgcaggggaaaccggaatatccgccatcagggttttgatcttgttttcgatccgatcgacgtcgatatcgccgactatgacgatcgcctggtattccgggcgataccacgttttgtagaagtcgtacaaggctttatggtcgaaactcttcagaccgtccagatagccgattacgttgcggtgctcgtatttcgagcctctgttgacggcggcgttgcgtcgtaccatggcgcgccatccagctccgtcgcgggtgcgcagctcctccatgattacgccgcgttcgttgttgatctcctgaggctccagactgatgaactgcgaccagtcgtgcaggatcagcagtgcggtgtcgatcgtcgcagggtttgctgtgggcacattgtccaggttgtagcatgtttcatcgtaagaggtgtaggcattcaggtccgcaccgaatttgacgccgttacgctccagatattctatcatctttttgcccggcaggttcttggtgccgttgaaggccatgtgttcgaggaagtgggcgaggccctgttgggaatcttcctcctggacagctcctacgtggtggaaaatgtagaaggatgcctgccccttgggtttttcgttgtgacggatgtagtacgtcatgccgttttcgagctgtccgacacgcacctctttgtctgcaggaatcggcatgtcgggccgcagttgcgccacgacattcgtcattgcgaacagcgtgacaagtaaaagaatgaaccttttcataaaatgattgttaattgattttgggtgaaattatttgtattgctttgtcattcggtcgtttcttccggtcggtattcgatgatgtcgcccggctggcagttcagttcgcggcaaatggcttccagcgttgaaaagcggatcgccttggccttgccgttcttgagaatggaaaggttggccggggtgatatcgacccgctcggcgagctcgccgagtgacatctttcgtttcgccatcatgacatctatgttgatgattatcgccatgtcttgcgtcccccccccgtgtatatattgtatatcgacatttattttttctttagatcgtgagtttttgctcttcgctcaaccgggatccgatcgagaagacctcggccgagaagagtaccagaatcgccatgacgatgttccagtaattgagcgggaacgaggcggcgacttgcaggggcgaaccttcgagaagcgtccgggccgtgcagtggtaaatataaacgccgaatccggcgcagacttcggccagaatcagcagaaatcctacggcacgcgtgtagatgatgatacgtcccggcaggggttgttcgtcccgtaccgatttgcgcaggatgttgataatcagcgctaccaggatcagaatagagagtttggccagcagggccgggatgaacagcaacagggtgtagttgattttgttcagtgcccggactactgtcggatcgctgttttcgtccgttttgacgtagatattaacccccgtatattcggcttcggtggagatcgatgcgtgtccggtttctatcgggaaaagaatttcattgctctggtcgttttgcaaccgggccgccaaaaagtaggtatgttgcgcgataccgtgtttttcctgcatccgaatgtcttcggacgcagcctgccaacctgtcgccagactcgacgacacgtggggcacgaagctgtggatgaatcctgcggccagagccaggaaataaaagatgtaaatgaccagcagatggcgccgcagagattttttctgttttttgtccattttcggtttgctgaatacgtaatgcgaggtgttcgacctgtttttaacctccggtgaggcaaagatagtaaagaacttctgcaaaacaaataatttttatcgtttttcgataaaaacataataaatataacgaatgatgtttcgcgcctgaatacggagcggaattttccggactttcctcgaaccggagatcggacgggcaacccggctgaaacctaccgaaggtcggaccggcagggagcatccccgtcttggaggcgaggcccctgcaagtacggacgatcgaaacgagaaagcccctctacgagcttcgttacgcgggggagccgaaaacaaaagttgaatttggttctccgctcttcttgttattatctttaacttcgtcttggacactccgcgccggtaaaacgcaaataaatttgtttttgcacccggcttattcgtatctttgcacgaaatgcagtctgcacggccggaaggcttcgctccatttccggcatacgccgctactgtccgcaggaagccgggcgggggcgtttttgtaggaatggaaccattcggtatctacggctttctcccggcccggcggattgtcgtttcgttgcatttgaaattgaaaaacgcactgaaatatggcagaaaaaacaggttacacttattatgcagaccctcagcaggtcgatttcacacttcggatgaccgttccggctttggcgaacgaggtcctcaatacggcgggtgtcgatgcccagcgcaaagggttcgggatcgataagttgaataaggaaaaccgctcgtgggtgctttcacgcatggcgatcgagatcgacgaccgccccgaacaatacagttcttatgaaatagtgacgtgggtgaacgagtacaaccggatgctctcgacccgtaatttcacgctgcacgatgccgccggccgggagttcgggcgggccgtgacgcagtggtgcatcatcgacttgggtgcccgcaaggcgatcgatctcaatacggtcatcggcacctgcgccgattcgatcgtggacgctccgtcgccgatcgaaaagccgcgcaaagtgacggggatcgttccgcagcatattgccgaacaccgggtggtttacagcgacatcgacttcaaccgtcacgtcaatacgatgcgctatatcaacatgatgttcgatatgctgcccatcgaacagctgaccgcgatccgcccggtgcgtcttgacattcatttcatgcacgaatgccgttacgggcaaacccttacggtcgggtacgaacaacgggacggcttgtcgctgttcgaggtttcgaacggagaggaagccgctgtccgggcggcgctcgagtggcgttgatgtgtcgtatttcgtggtggcgggcgaggcagggagccgaaccgaatcgacttcgtttcggtccgtttttacgatcggctttgttcctttctggaacgggttttgctgatatagagacaaaacctttattattatggaaaagatcaaagttgcgaacaagtaccagaaaagtatcgatctattgaacgatgctttgggaaaagagattgccacctcgctccagtacatgtatttccatgtccatttcgaagatgccggttacgagtatctttccaaaaagatgcggatgatttccatcgccgaaatgcgtcatagcgaggagttgtccgaccgtatccttttcttgcagggggacgtgaatatgaatccgtcgtttacgacgcgccagatcaccgatcccaaggagatgttccgtttctctatgcaactggaacagagtacgatcgatagctataacgatgccgctcgcattgcggccgaagccgacgattcggtaacgcacaagatgttccaggatctggccgtcgaagaggaggagcacctggactatttccgcaacgagttgcagaacctgttcgattacggcgacaaggagtacctcgccttgcaatcttttgcacgcagcaaggccgaagccgaaaggaaggtttccgagtagttttttctcgcggacgcgagataatgcgtcccatacgtggtttttgaataaaatttactatctttgtggggtaaacttaaaactacagagatatgaaattttatatccgtatcgtgctgctggcgactttcctgacgagtttgttgtcggctcacgcgcagtccccgaccattacctgggacagcactttgaaggacctcggcgattcgaattacgaagtcgtatttacgggtaagatcctgccgggatggcatacgtacgacctgcattcggacgtttcttcgaccctggtggagttcgagcctgcaacgggcctgacgctcgacggcgatccttatgagatcaacgcttccaaacgcgaatacgacgatattttcgaggtcgaaatgggtacttatttcgatgaaatcatcctcggtcagaaagtcaccctgacgggtgagggcgccgtattgaaaggcaatatcaactggcgttcctgcgaggaggaaaattgcaattcgcccgaggattggggattcgagatcacgatcggcgatcccgaggcggcccgggcatccgttgcggccggggatgctgcggatcaacctgtttccggcgacggagccggagagtccaaaaccctgtggggtctgattatcgaagcggttctttggggcttcgcggcgctgctcactccttgtgtattcccgatggtcccgatgaccgtatcgttctttatgaaaggcagcggatcgcctgctgcgggacgtttcaaggcttcgatgtacggtttcttcatcgtagcgctctatacgcttcccattgcggcgatcattctgattacgcgtctggtgggcggcgatgccgtgacggccgacattttcaactggctggctacgcactggcttcccaacctgatcttcttcatcgtgttcatgattttcgccgcatcgttcttcggggccttcgagatcacgcttccgagctggatggtcaataagagcgaccggcacgcggacaaaggcggtttgatcggtatcttcttcatggctctgacgctggtgttggtgtcgttctcctgcaccgggccgatcgtcggcaacgtcctgattcgttcgactgccggcgaattctgggtgcctatcgtgacgatgttcgctttctcgctggcttttgccctgccttttacgattttcgctttcttcccctccttgctgaaagacctgcccaagagcggcggttggctcggttccgtgaaggtcgttctcggttttatcgaggtcgccctcggtttcaagttcctgagtatggccgaccagacctaccactgggggttgctcgaccgcgaggtttatctggcgatctggatcgtcgtgttcacattgctgggcttctatttgctgggcaagatccgcttcgctcatgacgacgaactcaagcacgtttcggtgacccggctgacgctggccatcgcttcgctttcgttcgcggtctatatgttcccgggtatgttcggtgcgccgctgaaagctctttcgggctatttgcccccgatgcatacgcaggacttcgtaatcaatacgcagggcgtcgttaccgcaccgtcagcaacggcacagacgactgaaaagatcaaatatgcggatatcctgcactggccttacgatctgccggggtatttcgatctggcccaggccgaagccgctgccagggaggccgataaacctttgttcgtggatattacgggaatcagttgtgtgaattgccgcgaaatggaggcccgcgtctggagcgatccgcgcgtgcagcagatcctgcgcgacgattacgtgctggttgccctctataccgacgacaagaccaaagtacccgagaacgaatgggtgaccactgcgggaggcaaggttcttaaggacatcggtcgcatcaactcctacatcgcccagacccgtttcggggtgaacggacagcccaactacctgattctcggccgtgatgggcaggaattggttcccaagcgggcttataacctcgacgtggaggcatacatcgacttcctgaagagtggtgtggaggcgtataataaaacgaaataggatggatagcgaaaccggttcgggcagtttctgccgaaccggttatcgttatctccttgttgcaggattcggtagggtatttgtatttttactaaaactgccgtacgtcgtttttcgaaaacagaagggccgtaccgaaggtttgaatccgttcggggattcgatttaattttcaaaataaagttcgggatatgaaaatttcgatcgtggggcccgcccatccgtatcgagggggcttggccgtaattatgcagagcatggcccgggttttccaacgccggggcgacgaggtgaagatcaagactttcacgctccagtatccccgtattttctttcccggaaggaatcagacggtgcagacaccgccgccgcccgatctgtacatcgtgcggtgcgtgaatacgatgaatccgttcaactggatcgccgtggggcggtggatcgcccgcgagaagccggatttcgtgctgatgaaatactggaccccctttatggcgccctgtttcggtacgatcgcccgttttgccaaaaagaacggtacgacgcgtatcctttgtcagatcgacaacgtcgaaccgcatgaacgccatatgaccgacaagccgttcaaccgctatttcttgagggcggtggacggctttatctatatgtccgagcaggtgcaccgcgaattgcgccgatatacgcaagttccggcactcttctctccgcatccgcttttcgaaaatttcggtatcgtcatcgatcgtacggaggcctgcatccgcctcgaactggatccttcgaaacgctatgcgctctttttcggtttgattcgggactacaaggggttggacctgttgctcgatgcctggaaggtctacaagcgggagcatcctgccgaagaccggcgcctgatcgtggccggtgagttctatgctccgaaagagaagtatttgaagcaaatcgccgacaacggactggaggacgatgtgattctgcacgactattttattccggacgaattggtgcgttactatttttccgtcgcagattttttggtgcagccgtatcgttcggccacgcagagcggcgtgacccagatcgcttatcaattcgacctgccgatggtggtgaccgacgtgggcggtcttccggagatcgtgcctgacggtcgtgtcggtttcgtctgccgtcccgatgccgtagaagtcgcccgggccatcgaccgtatctggcgggacgatgtgctcgcgggattccgtgcgaacatggaagaggagaagaagcgcttttcgtgggatgcgatgtgcgatcgcattacggagctttaccgattggttaaataggaagcgtagaggggcgatccgattaaataggaactcttgtatctcgaaagcggaatctcgtacgatcctcgtcgctttagtcgatagactctttgttacaaaacccccgctgcaaattgcagcgggggtttactcatcatttttccggtagaccggggatacggattatcgttatttcttgatgttgggaagctccaggccgtagtgctttttacgatcttcgagcttgagccagaaagccagcaggaaagccaatacgccgaggctggcgaaaatcagcatcggaaccgtgtagttgtagcttacgtgttcaccggctttgatcgcttctcccacgccgggattgaccttgttgagaacccagccgatgatcatcgggaaggccatcagtccgaggttctggatccagaaaatcgttgcataggcagaacccatatagcggttatcgaccaacttgggtaccgaaggccacagggcggcgggaaccagcgagaaagagaggccgagcaggatgatcgccgagaacgcgatagcgggggtgaggggaaccagtgcgaaagtcatgtggcagatgaacatcaggatcgcaccgatcatcagcatcgtcgcgcctttgcccttgtggtcgaggaaccagccgagcagcggagtcaggatcatggcccccatcgggaaccagcggaagatgtccgaagcctgctggttggtgatgcccagattactttcgagcatacccgttgcgaaacgctggaacgggaaaatcgccgaatagtagagcacgcagagtgccgaaacgatcaggaaggttttgctgctgaaaaggttcttcagatcggcgaccttgaagggctcttcggtttctcctatcggggtgtctgcctcggtttgtctgtcgagtttgaagtccatgaccgagaatgcgatgtaggtcagcaggccgatgcagagcaacaggccgacaacggctaccggacgtgctacgctcggatcgccgccccagttagccacccagggcgacaggctgaatacggcgaatacgcccagtcgggcaatagccatttccaggcccatcgccagagccagttctttccccgtgaaccacttgacgattgcgcgggataccgtcacaccggccatctccgtaccgcagccgaagaccatgaaacccaggcaggcgagcttcgcgctggccgggatgtccgtgaggaacgaactgaggaactcgtaaccgaatccgccttcatagaagtagttgctcagtccgtagaatttgataccggcaccgagtaccatcagcgaggccgaaagaatacccgtaaaccgtacgcccatcttgtcgaggatgatacctgcgacgagcaggaaaccgcagacgttcagaatgaattccgaaccgccgtacagtccgaaaatcgtggggctccagcctcgggtgctttcgagcatgttctgcaacggcgagaggacatcgacgaacatgtagccgaagaacatggtgagcgccaccagaatcagtgcggtccatcgggcgaacgccgagtcgttcagtttcttttgaatagcttgtgtcatagtttattgaattggttattgttagttaaaaagcttctgtatgctcccccgtgtaacgtttgaggatttcgtaggccgaggtaatgcccagctctccggctttcgagaggtcgaggcagcccttgcgcgtgtctttcatatagatttgggtcatgccccggttgtagaacgcttcggcgaagaggggattcagttcgatggctctcgagaaatcttcgaaggcctcgggcagtttgcctgaaagagccagcagcgttccccggttgtagtaggcttcggcgaagttcgggaagaggcggagcgtcttgtccagatcggcgatggcttcgtcgtaattgtaggtgcgtgtatgggtgttggtgagtttgttcgccgggtcggagtcgatcgaaattcgctgatagggattgtccaggcccgaaatgaagtcgatcatttcggcccgtgtcacggcccggttgaagtagaggaatggattggcggcattgtctgcgatagccgacgaataggcgccgaccgaattggtgaattgtcggatcagcgattgcgaaatggcatattgtacttgcaggagccagtcgcgcggattctggcacaggatttcggcatagcggctgtcgagcatcgccaaagagtccgcatcgatgttcgtaggccggttggagaggacgaggtagggattgtccagttttttctcgaagtctttgacccgttgcagggtatagcggttcgacgcctcgatccgggaggtatcgggctgcatcagggtgaagcggaacaagggtagcagacgcatgttgctgcggcccaggctcggttgttccgaaatgcggtcgaagtagttgttggtgaattggttgtcgaaggccagcagtttgtccatccgttgcgtcgtatcggcatagatcgagtaggtgctgtccttcaggtgggatttgtattcggcgatcttgcgctgggcgatctcttcgtcccgtttcgcagccttggggttatgcaacgcataacgcagggcgctgcggttcaggtaggcgttggcgaagtcggggtagagttcgatggcccgggtgtagtcgcgctcggcgccttcgaggtcgcccaagcgggttttgagcatggcacgcaggtaatagacctggacattgccgggagagtagagcgccacgcggtcgaagtcgtcgagtgcgcggttgtaatcgccgatctgggtgcggagaatcgcccggttgaaataggtgaacgagttggtcgagtccagttggagtacccggtcgaaatccgcgagggcctgcatcggacggttggtgttggaatagaccaccgcccggttgaaatagggcggcaggaaagccgagtcgcagcggatcgacatgtcgaaatcggcttcggctcgggcatactcctctttttgcagcaacaaggttccgcgttggtaatagccgttgggattttcgcggttggtgcggatcgcctggtcgaaattttccagggcccgtacggtgtccttcaggtacaggtaggctgtgccgcggccgatgtaggcgtcggctaccttgttttcctggaagatgaatttgtcgaaatcctcgatcgcctcctcgtattgcttgttctgcaggcgcgtatagccccggctgtaataggcgtccggcaggtcgggcctcaggtcgatcgcctcgcggaaatcctgcagcgcgtcgtcgtagttgcccatgcgcgtacgggtcagcgcccggtagatgtaggcggtcgtgaatacggggtttttgacgatggcagccgaaaagtcggtatcggcacccagcaggtcgtcgaggttgaatttggctacgccccgcaggaaatagccctctgcggcgtccggatcggcccgcaacaggatgttgagcacacgaatcgcctcctgatattcgcggttcatcaggcaacggcggctggcccagtagaaatagtctttgttgtattgggcgtcggcagtggcggcgttgctcagcagcgtccccaataggatgattttcaggataaatttgcgcaatgccacgacaccccgatttggttgtgattattcttgttcgtacccgaagcgcttgagttgccgttcgttatcgcgccagttctcgtttactttgacgtacaactgcaggaagaccttcttgccgaggaattgctccatgtcctcgcgggcctgctgtccgacttttttgagtttctcgcccttgtgcccgatcaggatacccttctgggagtcgcgtgcgacatagatgaccgccgaaatgcggtcgatcgtcggttcctccttgtaggcttcgatcgcgatttcgcaacagtaggggatctccttgtcgtagttgcgcaggatcttttcgcggattatttccgaggcgaagaatcgcagcgttttgtccgtgagcgtatctttggagtagaaggcttctccctcgggcagccgttccagaatcaggtcgaaaagtcccttgatgttgaaattctcgcgtgccgataccgggacgatcgtggcggccggcagcagcgcctgccatttatcgacgagctcttcgagcttttcgggcgtcgtgaggtcgatcttgttgattaccgcgagggtgggaatatcgctttggcggatcttttcgaggatgtcgttcgaacggtcgctctgttccaccgtgtcggtgacgtagaggattacgtccgcatcgttcacggcgccggtgacgaatttcatcatcgattcctggagtttgtagctgggtttcaggatgcccggcgtatccgagaagacgatctggaaatcttcgccgctgaccactcccagaatgcggtggcgcgtggtctgggctttggaggtgatgatcgagaggcgttcgcctacgagtgcgttcatcaacgtcgatttgccgacgttgggatttccgatgatattgacgaaaccggccttgtgcataggatgtctgttgtctgattctcacgaaaaggcagtgaaagcgaggaccgcataaaacgaacgaacttgtttttcatgccgggccgccatgctgcctgctccaaaaatagtgaaagccgagagcaatcgcacggatttgcacgctaagattgccgaaccgcctcctatcttttacaaagatagcgaaaaaaataccccctgccaaatgaagcgtcatctttctatgttcagaaggtgtcggtcggtggcgtttttcggataaggggggccgagggaggttgcggctcttttcgacaccgctgtttttccggaaaaagcccgttatcggacggattggaagatcgggccggaaaaaacgcgttttcttcggtccttcgcgttgtgttttcctctccggttttttcctatttctgtatatttttcttgtactcgtctgcaaggtgttccggacgaatccgttcttcgtgtttacgggcgaagccttttcggatttgtcctgcattctgcttgcccaattatgagctgacaccgatttcggagagtatgtgtgaatcgcctttccgctgccggtgcgtggttgcagaggatgccggatttgcccggaagcgggtcgattatatgatagatgtcataaggaaaacccctttggttcggagcccgaaccgaaggggtataaagtagttggcgaagtattcattccgcttatctgcggaagccgcgtccgggtaatttgggcattttcatattgcctccggcgacggccttcatcatcttgcgcgtgtcttcgaactgcttcatcagtttgttcacctcggccatcgtcgtaccgctgcctttggcgagcctttcgcggcgcttggcgtcgatgatttcgggtttctcgcgttcgaggggagtcatcgagttgatgatcgcttcggtctgcttgaatacgtcgtccgagatctcgacatttttgagagccttgcccataccggggatcatcgaggccagatccttgaggttgcccatcttcttgatctgggcgatctgtcccatgaaatcgttgaagttgaactggttcttgacgatcttcttcttcaggcggcgggcctcctcttcgtcgtactgctcttgggcgcgttccacgagcgataccacgtcgcccatgcccagaatacggtcggccatacgttccggatggaatacctggatggcatccatcttctcgccgctggagatgaacttcagcggtttgttcaccaccgcacgaatcgagatcgccgcaccgccgcgcgtatcgccgtcgagtttggtaagcaccacgccgtcgaaatccagccgctggttgaactcgcgggccgtattcacggcatcctgacccgtcatcgaatcgaccacgaagagcgtttcgcctggtttcacggcctgtttgatcgccgtgatctcctgcatcatcgcctcatcgacggccagacggcccgccgtatcgacgatcacgacgttgaaaccgtgctgacgggcgtatttgatggcattttcggcgatctgcaccggatttttattcccctcttcggtatagacttcgactccgatctgtccgcccaacaccttgagctggtcgatggccgcaggacgatagacgtcgcccgccacgagcagcacctggcgtcccttcttgctcttgagcatcgccgccagcttgcccgagaaggtagtcttaccggagccttgcagaccggcgatcaggatgaccgcaggcgtgccctccagcttgatgtcggtcgccgtgccgcccatgagttgtgccaactcgtcgcggacgatcttggtaatcatctgtcccggcttgacggacttgagcacgtcttgtcccagggccttctgcttcacctcgtcggtgaaggatttggctaccttgtaattgacgtcggcgtcgatcagcgcccggcggatctccttgagggtttcggcgacgttgatttcggtgatgcggccttcgcccttgatcagcttgaaggaccgttcgagtttatcggttaagttttcaaacatagtttcggttcgttatcgtatgccgggaaacggtgccgcccgacgctggagcatttttcgttttgcggagccgtcgttgcagtcggttttttcagtccggacaaagctaaagcggtgtcgggcaaatcgttctccctgttcggccgttgcaggtccgctccggatttttcgcttgcaaatatataaaactattcgcagaatcgcaacggaggtgctgattttcctcggtgtcggcgacaaagacacaacccctccgagttctcggaggggttgtctgatggggctgtgccccgtgttttcggtttaatagtgtgcgacgtacatatgacggctcaacaactggtagtcgtattccgtaggctccacatcccgattgacctggaaaagatactcctgtcggtagtagtattcgctcatagggccgttttcgtccgtattttcacccatataccgcagttccggttcggataccgtgaaacagttcttgtcgagcggaagcatcggcatccagtgggttttctgttcaccggtcgcaggatcgaagactgtgcaggaaggatagaacacgtcgaattccagattgaccgtgaagcagttatattccagcgtatagacgaaacggtgggggtttatctcgttttcacccagcggaatctcgttgaaagaggtcgaaacgagccggaagttgtccgcttcgtcctgcgtgatgtaaaggtagcctaatacaagaccttcctgagtcgagggattgatgttgatctgccgatattcggttttttcgctggttctgccgtcggacatcgtgctgcggatcttggcataggaggtgtaggcgtttacaccgtaccatttttcgtccggattgtcttccgagaatgtatagggaagcgttccttcgtccacgacttcctgtttggtcaggtaggggatgtaatcgggtttcgaaacggtttggggaccgtagtggagcgtatattccgtgcgctcgctgccgctgccgccgccgtcctgccaattctcttcggtcacgatcgtgctgacgcggccttcggcgtcgaacgtgtaggtgtaggtcatagtgctgttgccgtcttgacggctggcgggcaggttcttaacggtcgtaccgctgatgccgagcagcatggcggactcctctgcatcgccgatcatgaaggcacctatgtcgatgccgttccaggggttgaggtgttcggtgtaggagaatgtcgttgtttcgttatcccgtccgtcgatggtcgaaatggaaacgatgttgccgtcctgccaggtaagtgtcgcggtagaattcgcttcgggataggaaggatcgcggtattccgagcgagccagcgtgccgtcggcgttgtaggtgaaagtctggctggcgccgtccgggtcggtgtagccgcttaccagaccgcttgcattcaggcggtattccttggcgtattcgcccgagttgggaaggggcattccttcgtagctgctgccgtcgatttcgaaccatttttcttcgtccgtgattttcccttcgcttcgtttgagcgtcctttcataggaggcattgattttgtcggtctgttccgaatcgtaatcgtattggtcgtaaccggtcagaagaccttcggcatcgtattcgaagagcaggtaactcttgtcggtgctggaaccgtcgctgtaaacctcggtgtaggtcgtttctacccaagtcagccggtcttcgggtgctacgtcgggatgttcgggcttttgaggattgtcgggattattcgggtcttccggttcgtcttgtcccacgccccgctgggtgatggagatatttgcggattctccgccgcaggagatggtgacgaccgcctggcgggattcggtcgtttcgttttcggtgagcgtgacggtaatcgtgtgcttgccggcgtcgcccgaagtggggttgatggagatccagctttcggcacgcgaggtttcacgcacggatgccgtccagctctgggtcgtttcgaaaccgatggtatgggacaacgcatcggccgaaatcgaggccgataagttatcctgaggaatcagaatgttctgaaactcatctgtttcgctgtcgctgcaacttccccccccccagcgccagggtgatgagagccgagaaaatgaacagttttttcatacgataaagaatttgaacgataattggttaagtaagtcgggcaattttgtccgatcgttgcaaagatacgaataagccgagcgcaaaagcaaattttatttgcattttgccgaggcggagtatctaagacgaagtcaaagatacgaataaactgcgtgcaaaagcaaattttatttgtattttgctgaggcggaatgcttgaacgacgttaaagattagaaaaaagccgggtgcggaagcaagtttatctgcactttgtcggatcgaagcgtttgaggcgaagccaaagattatgaaaatgccgaacagaaatacaaatatatttgtattttgacggagtggtccggagatcgtgcccgtatgggtattttcgtctgtcgaatgggagggtggatggcattcgatcgtgccgtcggtggctgcggaggttgcagacggacggaaaacaggggcgattgtctgtgaacggcgggcggatgcggtttacagcagccccgcttcgtaatagagaacgatctgttcgagtaccttgtcgtccccttctcggtcgtattccgacttgagattctgtccgaagatacgcgatacgctttgccagaatcccgcgacgaagccgccccggaactcccggaggatttcgtaagccgtgtatttcgtttcccggtcaatcagcttcagaagcacgcggccctgggtacgggtcatgtgtttcagcacgggcgtgtactcctttttgatcgctgcggcgatgcctttgatgtattgtttctgttcctttttcgtttcgagccggagcagttccgcctccatttgaaccatttgtgctttggcggcttgggctacgggatagactttcttcaccgcttcgaccagtttgcggtaacggcgcaggtcagcttttttgctgaatacgaagacgggttttatggggacgaccgagatcgtgtcgccgtcgtgtccgatttcgaaagaggtgtgccatcggcccggctgtccgtgtcgggccgaagcctgcccgggcagggagagcagcaataccagggataggaaaaaccactttttcatcggaaccggaattttcgtacctttgtcaggatgaaacacaagggcggagagggcgcttctgtccgaagcggacggatttcgaatcctcttcgcaattcaaagatagtgaaatgtgagggcaattgtgagaacttgttctcgaaaattgccgaaccgaatcctatcttctgccaaagatagtgaaagccgagcgaaaacgggacttgttcccggttttccgaggcgcctcctatctaaagctatgttcaaagataatgattctgaattattaacgcaataaaaaacggttgtattatgatggaaaaaggactttctgcacaaagtaaggtaacggtcgatggcggcaacgtggctgcaacgatgggatcgggcgacttgcaggtattcgctacgccggctatggtggccctgatggaaaatgcggcgatgaaggctgtggctgaccatttgccggaaggttcgacgaccgtcggtgccgagatgaacgtgacccatatcaagccttcgggcgtcggtgccgaaatcgtcgcatccgccgtgctgaccgaagtcgaagggcgtaagctcaccttcaatgtcggggcccgcgatgccgaagggatgatcggcgagggggttcacgtccgctatgtcgttgatcgtgagaagttcatgtccaaagttcgctgatgcggaatcttgtcccggaagcaacggaaggaaaaagtaaaaaaggctgtccaacaagttttttaatccttttagaatcgcgtattcggaaaagctctcgaataagcagtacaaataaaaaagggctgtctgaaacttgttagacagccctttttttgttgttatgctttttagcccagcagcaaatgttcgaggaaaataaccagcatgcccgcgaaatacccggccaatgccagcagcgtgattttacgcaggtaccagccgaattcgatcttttccagtcccatcgccactactcctgcggccgatccgataatcagcaggctgccgcccacgccggcgcagaaagtcagcaggtgccagaagataccgtcctgtacgaacgcctgcatataaaccgggtcgaggctcgaggccagggctgccgtatcgacgacggggtacatacccatacaggcagccaccagcggcacgttgtcgattacggccgacagcagaccggtgattccggcgatcgtatagacttcgtgtacgtttttgtccaggaagtcggcgaagtcggtcagcaaaccggcgctctgcaatgctgcgaccgacatcagaatacccaggaagaagaggatcgtgggcatatcgatatgtttgagtactttcgacacccggtttttgatagattcctccatgttctgtttgtggtcatagacgagctccgtgaagacccacagcacacccaacgatatcagcatgcccaggtagggcggcagtcccgttacagccttgaatatgggcacgaacagcagcccgccgacaccgagaacgagaacgaagtggctgaagcgcgggccgacgaacggcggcagcttgggcgccgtgtctaatttttcgggatgcgcgttttcgtcgggaatataacggcaggcgatggccgtgggaatgattaccgataccagggccgggaggaacagtttggccacgagcaggcccgaggtgacgttgccccgcatccagagcatgatggtcgttacgtcgccgatgggcgaaaaggcaccgccgctgttggccgcgatgacgatgacgctggcgaagatccatcgttctttctgtccgctgatcatacgccgcagcagcatgatcataatgatcgtcgtggtcatgttgtccagcacggcggacataaagaaggtgatgatcgatagcagccaaagcagtttgcgtttgttgcgggttttgatgtggtcggtgatgacgtggaatcctccgtgccggtcgatcagttcgacgatggtcatggcgccgatcaggaagaagaggatttcgctcgtatcgccgagttgctcgatcagttgcgtgccgatctgggcgtcgttgcccagcaggctcaataccgtccatagcgcaccgcacatcagcagggcgattgcggccttgtcgatgcgtagtttgtgttcgagcgcgatgcagaggtacccgagcacaaaaatcagaatcatggttataatcatatcttactgcattgaattttcgattttatcgatggagtcggagcgccgcaatccctgtgccgtagtgggtgagtccggtgattcgggcctttatttttcacttttttcgtggaaatttttcgcaggcttaccattcgcggaggattttttttgaaatttcgattctttgccgtacctttgcacctgctttcgagcatcggattgaactatggtgtaatggtaacacagcagattttggttctgtcgttcctggttcgagtccaggtagttcaacactgtcgttcgtagccgaagtcgctgcgacgggaaagaccggattttgaatccggtctttttgttttcgtgcacggccgtaagcggcgaataagcgatcgtctgattcgatgctgcgagcgcttcaaaattataatcgcctttgttactgttgctgcatccttttctcatcgggttgccgctttcgaaagacgttgttgggcgtgccgtcggatcatcgtatttttccgaaaaggtttctgcttttgcctctgccggggtgggcagcactttccttttcatttaatcgcccgttaccacaatcgggccgggcgaccgacagacatcggcagcgccatttccgggagcggtgcgactgacggtatagctgcttttgtttttcctttgtttccccggattttggagaaccggaccgttctcgggtttcgtcgtagccgttattgtccgagggcctgacgccaacgcctttgccagctggtcgggacaggatgttccccggcctttgcagtcgatgccttcgagacgtgcgatcacgtcggcagcctgcatcccgcgcgtcagcagacctattccctgggtattcccgtgacatccgccttcgaagcggacgcttttgacgatatctccctccaattcgatttcgatggatttcgaacaggtaccttgtgtcttataagtgaatttctttgccatttcgaaagaatttcgtacgcaaatatacgaataaatggatattttcagcgtccgatgtgtcggcgtgtgtgtttccgtgcgtaccgggaatccatggcttttgcgtattcgaatccgtccctcttctcttgagcctcttattttcggttttttgattctggccggccggtttggttttgctatttatttcgggcgacgaccggataatcgtatgtaaaactccccttcccgatcacgggaaggggagttctcttgtctcagtacttttttatttctgctgttgctgctgcaggtcgctcgtgtcggcgacgaccatgtttttgtcgatgcggagcgtgacgttgccgtccacttcgatcaggagggtcgtctccttgatctctttcactacgccgtaaataccgccggccgtgatgatcttgtcgcctttcttaaggccggcccggaattgagccatctgcttgcgtcgcttcgattcggggcgccacatgaagaaatacagaaccagaatcatcaggccgagcatgatgaagagcgaatagccgccgccagcctgcggtgcaggtgctgtcgcttgaagtaagttaatcatagttttctattgatttgatatttggtttttctttatgatcggtacaaatatagtgaaagccgggtatcgcaccaaattattcgaatgctggcggccgtttttcccgaaccggtgctttccgatcgagattcgcacctgccggagatgccttcgaatatatcgggcaatccggatttcggctgcctccgttggattttccggtaaatatagtcgaaatttgcgggagtcgcagccgttcggcgcttctttcctgcgaattaacaatttcttaatcgacatcggcttcgacgtaaatccgtaacggctcctccgatcccgacgcatagagtttcaacagtttcatctgccagccgtgctcgccccgcgagtcgaaccggacgctgaacgggatttcctcgcccggcttcaggggccgtcggtcgaattccggggtgacacattcgcacgaaacctcgtagcgggccaccacccatgtccgggacgaagtattttgcagccggaaccgtttgatgcctgtttcgccggagtggagccgtccgaaacggatcgtgtccgaagtaccttcggtgagcgtttcatccgatatttcgagcgtcggcccgctctggacgctgctcgtccggcgggattgacagccgatgacgagggttatgagcaatatgcagaaaatgtgccgcatcatatcagtccccgtccggtttttttgagttttccctcttcggtcagcgcctccacgattttatccagtacgccgttgataaaggtgctgctgccgggcgtagagtagaacttggcgatgtcgatgtattcgtcgagggtcactttcaccggaatcgaagggaaggaaaccagttcggtgatcgccgtggccataatcaggttgtccatgaagacgatacgctccacgtcccagttgcgcgtgaatttttcgatgtattccagccgctcgttgtagttgataagcgtcttttcgaacagcgttttgacgaattctgcgtcctcgtcgcttttgaattcgggcagcatcttcacatccgcgtgggattggcgcatgttggagatcgtgcggatcacgagcgtcagtacgaatcccaggtcgtcgctccagaggatcgactgctcttccagtacgtcgtccagcatgggacactcctgcaactccttttcgaagaaggtcgccagaagcgctgcgtcggctttgaacgaactttccggagcgctcatgtaagcctggaaatagtccgtcgccgcgagttggttgtaaagtgtgcggatgagttcgggatatttgctccagccgagtttgcgggctgccattcggtcattcaccgtgtcgctgtcggcgatcatacggatcacggcgttgtcgatgaagcgggtgttggggtggaggtcttcgtaggtcggcagctttttctgtttggccagctcctgacgttgctgggcataatgcgccagttcgaccggaagggtcatcatctggaaataaaggtcataggtcttgtcgatcgaattcatcatgttcttttccgacgcgatcatattgtccgagtcggatttgagatgcgcatacagggcctttatcgccttgattctaagctgtcttctacttaacatatattttcagaactttgcggcaaacgggagtatctgccgtttgtccggtttgcttcgtgccgggaggcgtgcgggctgcttgtaaaacgaagtcgcgttttaccgggcgcggttcgccccgatacgaaaattaccggacaaaggtaggaaaaaaagcgcttgccgcaacctttttgcgcttctggggcataaataatcttgtgtccgctctttcggcaggagctgccgggccgattcgttgtcgtgccggtttttcccgccgcagaccggaattcgggattgtttgctatccatgtccgcggacctttcgccccggcaaagtgcgaatgaatttgtcttcgctttcggtttatcctgaatctttgccttgttcgcttcggcaaaatgcaaataaatttgcttttgcgcccggcttattcgtatttttgacatagttatagataggatgcgcttcagaaaactgcgaacaagttcccgttttctcccggctttcactatctttgtaccctatggaagagataagtcagaaagaaggggctgccgttcgcctgccttacgatgtgatcgtcgtcggtgcgggcgctgcgggtatgatggctgcggggactgccgcacggaacggacacagggttctgctgctggaaaagatggagaaatcgggccgcaaggtgcgtattacgggcaaaggccgttgcaacgtgaccaacgcccggccgcctgaggagttcgccggacaggtgcgtaccaatgccgagtttttttcgaccgctttcgccgagttcaacaacaaggctacgatcagattcttcgagcggctgggcgtgaagctcgatgtcgaacgcggcgagcgggtgtttcctcgaagcggcaaggcctgggatattgccaacgcactgctggaatattgcgtggacaacggcgtgaagatcgtttatgatactcgtgtaaccgaaataatgacgctcaacggtcgggttttcggcgtgcggtaccgcaataaacggggattcgagcgcaaggaggagtgtccgcgcgttatcgtcgccacgggcggcgtttcctatcccgccacgggttcgaccggcgacggctacgtctttgcggccgatacggggcatgcggtcgaaccggtgcggccgtcgcttacgccgctggtgtcgtcctgtctctggatcaaaaatatgaacggactgttgctccggaatgtccgtgcgacgctctgcatcgacggtgaagccgtgcgcgaagagttcggcgagctgggtttctccgagcgcggcatcgaaggcgctgtggcgctccgcatgagccgggacgcggtggacgccctgatcgacggcaagggtgtcggactgatggtcgatctgaaaccggggctgaccgaggagatgttgcgcgagcgcatcgcccgtgagatggcggagatggggcccgaggagttcttctccgaactgctccgcaagctcgttccgaaggcgctggtcattcctctttctgaagaggtcggcgcccattctaaaaattatatccgcaagattacgcccgagcagatcgaacggttggttaagctcctcaaggggatggtttttccgatttcggactatgcgcctttcgaatatgccgtcgttactgcgggcggcgtgagctgcgaggatgtgaaccgctatacgatggaatcgctcaaggtcaaaggactctatttcgccggcgaggtgctcgatctggatgccaacaccggcgggtataatttacagatcgctttttcgaccggtcgtctggccggtatgctcaaacagtgaaacggaccggacgcaatctacgccgccgccttcgcggtatttcccggctgaccgaccggctctcccgggcccgtcatttccgggggcacggcgtgcactcgccattcgtttacggacttgtgcgcgaagcgtttatgtttcatagactgcgcgacggagagcactgcctttacgatgccctgcgtcgggtcggaatctttcaccggcgggcggtgcagttgcagaacgcctttctctattgcggctaccggacgtttgcgatatgtgaaggcaaagccgaacctgttcggactttgccggatgcagagtttgaaaaaggcaattcgacgtttgtgatcgacgagggcagaggttgtttgcaggttacgccggggagggaaaacgaggcgaaaaattcgacttttggcctgaattgtgcgggtccgtacgacatggtgatcctgacccggaattttccggcggaggatttgcctgctgctgcggctcgggctgcccggacaggagcgacgctctgtgtgatgaatccctatcacggtagcgcacgcggcgaagcgtgtcgtcggatcgttcgggagcatcgttcgacgacggtcgataaccggggctatttgctggtattcaacaatcatttgccgaaacaacatttcaagttatgaagatatatacgaaaacaggcgaccagggaaccacttcgctggtcgggggggaacgggtgttcaagaccgacgaacgggtggaggcctacggctcggtggacgaattgaccgctttcgttgccctgcttacggaccatttgcggggagatgtggggttggagccccgtgtttgggagctcgcacgcattgcctcccagttgatgactgttgctgctacgctggctgtgggcgaaggcggagcggacaaggtgaaaggaatcgacgccgaggctgtgaagtttctcgaagaggcgatcgaccgtatgcaggcttccgtgaagccgattaccaagttcactattccgggcggacatcgtgtcgtttcgctgtgtcatgtctgccgcacggtttgccgtcgagcagaacgggcggcgcttcgggccgatgcgaagtatggcgtcgcaccggaggtactgatgtacctcaaccggctgtcggactatttctatctgctgggccgcacgctgaccgaatatttcagcgtggaggaaaccctgtggattccgtgacgggattttatcggtttttttcggaatttcgtacgatctgccgaggagttttttttttcgtgtgccgtaaggacccgactcggccgatgcgtttgaaatgccgttgagaaagacgcgtcggaaacgatccggcggaggcagtggcggtgtgcggataacggcagtcgaattcctgaattcgtgatgcggacaggggctgtcgatacatggccgctttcgatgcgattcggaaataatcgtgtgcggttgcggatccgccgaacattgtcggtctttgcgaaaccgctctttcggtcgaggccggaatgtgcggatcgtttcctatcgctatgtttgttcaaaaaaaatggcagaagaaatttttattcttttgatttgtatttctcgcaggattttatatattcgcaacctaataataaggaagctgtatgtcagcatggacttattgtcttgtgagttaatgatttaaattattgcagttatgtattggacacttgagttggcatcgaaattggaggatgctccctggccggcaaccaaagatgaattgatcgactatgccgttcgctcgggcctgccgttggaagtgctcgagaatttgcaggagatcgaagacgagggagatatttacgaatcgatcgaggatatttggccggattatccttcgaaggatgattttctcttcaacgaggacgaatattaattgttcgcaaatcgggttgttatacttacctgaagcagtccgagagggctgcttttttgtatggaattagatcgtaccggattcaaattgacgattgctttccaattttttatttaaatttgtattgtttgtattgcttttcacgaagcgaagtagaaaattatgggacgtacatttgtagaatactcgcacccagacgttttttgaaaaattcgtttgatgataatatctaattgtataacgtaatctacaaaaactatatcataagatatgaaaatcgatgctaaagttcagtctatatctaaattgaaggattatttctttttagtgcctgattatcaacgagaatatgtttggaaacccgatgacgaggtcgagcagtttttgatcgatattgaaaatgaatatagtcccgatgcaaaagagcagcgtaattattttttaggatctatcatcattgtcaataatgatagatgtttcgatgtcgtggacggacaacagcgtttgacaactattatgttgtctttgtgtgttttccgagatttattaaaaaaggagacattgaacagcgctcagaaaaattatttacagattatagaaaatctactttataactttgatattgaatcgggagagacccgtgtacgcttagaattgcagtatgaagagagtcatgattatttgacagccttgatacaggagcaaccttacaatggagtgcgatccccatctatagagcgaatgcaggatgcctatacgaaaatacttcgacactttcaattatatgccgggattgatgagttgatagattttgcgaaatattgcttgacaaagatagaactcgttgtaatcgaatctcaagatttgagtagtgcattgaaaattttcgagacgatcaatcagcgaggggcgggattgaatgctatggatttggtcaaaaatttgctgtttagtaataccaaagagtcggattttgccaagataaaagatatatggagggagattattcaaaatcttcaggaatgttctgaagatcaaaaacccctacgatttttgcgatattttctgagtgcccgatattataatggtatcttgcgagaagatgatatttataaatggattatatcttctgaagggaaacaggctacgcaatatgaaaagcatccggtagactttgcaaaggagatacgctgtatgtccaaacggtattcagaacttgtaaatgccactgaattacagcgggatgggtgcttgtatcctcacgtgacaaatataggctttattaataaatacaaatccagacagcatttgatcctgttattgtctttgggaagcaatgcggatgtgccggcaatcgaatatttggccaaacaaatagagagttttttctttttcagctcgaccctcaggatccaagccaagacgaatgaatccttgtttgtccaatgggcggagaaattacgtaatcttacgacgatagatgaaattgcctgcgtgatagagaaaacgatgttaccttatttgctggataaggtaggggtatttaaagccgaattcataactttgagtcatggggtttataatcccttgtatcggttgcgctatgtattggggaagatagaaaatacggtgttggaaaaattgcacagcccggtctgtggacatcaattttataatgatttgcaaatagaacatattttacctcaatcaccgaaaaatggaagtattccactggagtttttgtccgaggaggagtattactcctatgtgtatcgattgggtaatgtcacgttgatcgaaagcatgattaatcaggccgtgaataattataatgatttatcgacagatcaatggttttatgacaagcagtcggagtatggcaaatcgtctgtttgtctgacgaaattactcgatagtaaattttatatcggagtaaatacagccttgaatcgattcaaaaatgatttccaatacaattttaccggttggaacaagtcgtctgttgaggcgaggcaaaaaatattattggagttggtgttcgatacgtggagaattaacgatttaagattggatcgggtaaaatgaacttaaaatggatgaggattccggctgctgcttataatggttttttccggattgccggcggatgtcgatccggccggaatcatttatttgtgttgcttttccgcgatatagaacaggtcgaagcagtcgtccgctaccggtccgatgcggtagtcttccatggtgatcgaacgggtcagggagtcgttgtcccggagtaggcgtcggcggttgaggcggttgagcaggtcgtaggggagttgcagcatccaccggggcagccggtgttgtaggtcgagcacgtcgaaacgggtgatgcgccgaacgccttggcggtttttttcgtagtattccatgatccgttcattgccgaaaacgccgagggcctccactgacgcaaaggcgctgccgagcaggttgcggagttggtcgggattgtattccctgacgtgccaggggttgcgtgtcagcgtcatgcggatattgggggtggtcaggatgaacttgccgcccggacgtagtacgcggtgcacttcccgtaccagttccatgtcgtgtttgatgtgttcgatcacctgaaaggagatgacgtaatcgaagctgcccgacggcaggtcgagagggggaactacggcttgccgcatctccacgtgcgggaacggaggccgttcgcccgcaggttcgattttgtcgagcgtgagaaagctggaggcgtggggggcgactatttcgatgccgtaacccgtgcccgtacctatttcgagtacgtcgccgctgattcgccgtgctgcctcgtgataggccagttgcgaacgctggaatacgtagttgtccgatatgtcgcgcgatacgcgttccgccgtgagtattttagccattgtgcccggtcagttttacaccgttctgcgtgatttccactgcgccccgcttgaggagcatgcccagcgagcgtttgaacactttcttgctcatctgcgtccgtgcagcgatttccgccgggtcgctgtcgtcgttcaggggaagcgaaccgccgttttcgtggatcatcgaaagcagcgtttccgccgaatggcgcacttcggcgactccctgctgttgcaggctgacgtcgatgcggttgtcttccgtgatgcgtgtcacgtatcccttcagacggtcgcctacgtcgatgcggcggaaaagctggttgcggtagatcatgccccagtgacggttgttcacgatcacccgatagccgatcggggattccgaagccacgagcagcgaaacctcttcgcggggctttaccgtgataacgtcgttattgacgtagcttttgaatttcatggtcgccacgcagcgccccgttaccgaatctacatacatgtaaaccaggcagttccgtccggccaacacgcctccctgctggttgcggttgggcaggaacaggtctttgcccgcgagtccccagtcgaggaatgcgccgtgcaggttcttgtccactacgcgcaggaatcccgcttctccttcgcgcagcttcggcgtttcggtcgtggcgaccaatcggtcttccgaatcgtgatagacgaatacttcgagcgtatcgccgaccttgttggccagagaaacataacggttgggcagcaatacttcgttctgttcgtcgtcgatcagatagagtccgtagtccgagatgcggtttacggtgagggtttgtgtgcgtcctgctttgagcataatgggtattttatcttgacaaaagtacgttttatttttgccgaaagcaatttttgagcgaagttcctgggggcggagggggcggttccggaatatttcgtcttgtcgtgagatgcgatgtggttcggaattgaattttcatttgtaccggactttttgtatatttgaaatataaatggggagctgtatatggtgtgatgttttcaagtatatattggggttgtggttatttcgttaatcataatgactgcttcacaacaattaatatttcaagcctgctcccctccttgaatatattacagattattcaataattaaacaaactatgatattactcttgtttattatttgtatagttaatcttataacattctataatgtggattataaatattacaaagaacacggagagtggaacgatcatcctaatacatacggtggaacatttagaaatttaacagcagcttgtgttacatttgcaatagctgttgctcttcttcttgacaaatatttaggataatcgaacgaaaagaagcgagtagcgggaaattttattttagtaaaaaaacgaatggcgatatggaactgaaagtggctttgtgtcaattcgacatggtgtgggaagatacggcggccaatttgcggacggccgggagaatggttgccgaagcggatgccgatctggtgattttgcccgagatgttcgctacgggattcgagaccgatcccggtcgggtcgcgcaaccgatgtcgggtgaaatcgtgcaggagatgacccgctggggccggacgacgggcaaggccgtcgctggcagtctgatcgtcgaagaggaggggcgctattacaaccgtctgcttttcataaaaccttcgggcgagcgggtgcagagcgacaagcggcatctcttctccatcggcggcgaaggagctaatttttgtccgggacgggagcgggtcgtcgtcgaatacggcggcattcgtttcctgcttcaggtttgctacgacctgcgctttcccgtatggagccgctgccggaacgattacgacgctattatttacgtcgcttcgtggcctgcgggccgccgtgacgtgtggcggacgctgctccgggcccgggcgatcgagaaccaggcctacgtattgggggtgaaccgtacgggggacgacccccggctgcattattcgggcgattcggccgtgatcggctgtaagggagaaacccttgccgaagcaggggaggggcagaggcttttgaccgcacggctcgatatggacgagctgcgtcgtttccgcgagaaatttcccgcctggcgcgatgccgacgatttcgatctgaagtgatcggatgttcctcgatgatcggcaggacagttggctgtttcagcgcttttcgttaaatttgtttcaggagatgtttgtttcccgggaaatgattctattttttccgtttttcttgcttaggtcgtttatcggtgaagtggccggagtctctttcgcagtgaaaaaaatgatatatattattctccatgaaaacgacatgccttttattgactttgttatttgtgatcggattgacggcctgctctaaatccgacgaccctttgccggagaaggtgtttcaggatgtaaacaagacggcagaagattatatcggcgaacttaacccgaatttgtattataactttttccggtttcagaatgacagcgatcacacgttgtattggggcatcaatacaaaattttcgacaataatgggtctttattattgtcgtcccggacagcaggctacggatctgataacgatggaatactatccgggattgcatgattatgacattttaattgacaatttaatggctgtagggtggattgagttttatttcgatcttcctgctcctgatgatttgcctgattggagagttccgaatgaatttcaggatacgtgtgcgatgtatgtttttacagctttggagccgaacagtccgaaaaagactcccaaagatccttcacaatggaaatttgagaagttctccgatcatagcgtccgctggacgtaccgtgtcacgaatgcggattatgacgaagcggtgcgacagaccgaagaacgctgggccgaaaaagacgacgaggagtaataggagagaagatgtcttgcggcggtccgcaggacctgaaagactggcgcccggaatattgatattccgggcgctgaagtgtatgatttccgtttttccgccgttacaaaagggagctaaagatccgtttcgtcccagccgaggatcttgcagaagtcgtactcctcggggttggacaggtattggcgtgccgcttcgtagtcgggcggggtaatagccatcaggatattatctactacggctttgaagcggtcggacgagatgtccaccatgcggggcaggatcttgcccgtcgcggggtcttgcaggtctttcaggtagaggggttcgacgttgccgcagccgtccacatagaccatgcagcccgtcttgccttcgctgaagagcttgtaaacgccgatacccagctccgagcagtacgtcaggtcgtatgccaccggcgtctgcccccggatttcgtaacccaactccacggggcgggtctgtacgttgagtttcagcttcgcgagccgttggtcgagcagcatgctgaagaaacaggctttcgacactttgcccagttcgggatgaccgtgcgcgtcgtaggtgaagtgaataccgcacgaggagagttccgcctcgctcaattcgtggaacacgccttcggatatgaccgccgcgccgtagtccatgctgacgatccggcgcttgacgatggacgaaaccatcagacggatgatcttgtcgatggtgatcggcgttttgttgaacatttcgggaatgacgatcatcgggtagtggcacgcctcgccgataccgaaggccaagtgtccggcactgcggcccatcgccgacatgacgaaccagttgccgctggtgcgggcatcgacatagacggcccgggcgatcaccgcacccttgtctttagccgattcgtagccgaaggtcggcgcgcagtcgggcagcggaaggtcgttgtcgatggttttcgggacatgtatgttggcgatcggatgacgcttttcttccagaaatttggccacgcggttggccgtcgatgccgtgtcgtcgccgccgatggtcaccagcagcttgatgttgttctcggtgaagaactgccagttgaaacgcttctcgaaatcttcgtccgaaggtttgaagcggctcatgcgcaggaacgaacccgcgaggttgaaaatttcgtccgctttgaggaaggtgatgttctccgtggcgggcgcttcgcggaagagccctgtgaaacctttgtggagtccgatgacgctgtatcccttctgcaggaaggtttttgccacgctgcccactaccgtattcatgcccggtgccgggccgccgcccgtgagaatggcgatcgcttcgtttcgtttggtcatatcgtatctgattttatagctctttgacagcacgaaattaacgtgccgaaaatacaattatttcgtccgtgccggaaaaaatatggaggcttcccgagggagcctccatacgttctcgggagtaatgaaatggattactcgattacggtgacgtttatagcttgttcgcctttagctccgtttccaagttcgaaagcgactttctgtccttcgttcagcgttttgaaagaatcggatacgatgcctgaaaaatgtacgaagacctctttgccgtcttcgcgggtaatgaatccgtagcctttcttgctatcgaaccatttaacttgacctgtcataaatgaatattgattaaaaatgtatcagcaaagaaaggtaaaaagtgttgattctcaaaattttttcgcaattatttttgcacgttttttgttcctcgaaaaaatagttatatttgttcatccgtattatctgtaaaaagtttgaaagctatgggcaagaaagtaaaatgggcactattgacgatgctgggttttgcaacggcttgttcgacagtgaagaacgctcctcagggaaagccgcaggaccaggctccggattcggcccgggtcgaaagacagatccgcctgatgtacggcgtgcgtcctccggtacctgtcgaggaggtcgaacgtcagcaggccatccgtgagaagacagcccgcaaggaggttaaaaaggcacaacgggcccgtgagaaagaggctccggcttccaaaaacgaataatcgccgatgacgggacgaaagctcgggttgcgcaagcgtatcgggctgcgccttttttccgatctttatgcggagaagatcgccgaacacaagctgcgtacgctcttttgggagtgtacgctgcgttgtaatttggcgtgccgtcactgcggcagcgactgtcgggtcgatcccggcgtgccggacatgccgttggcggatttcctgaaggtgctcgatgaggaggttacgccccacaaccgcccggaagatgtcttgttgatcttttccggcggagaggtgctcgtgcgcagcgatctggaggaagccggccgggaggttacccgccggggctatgcctgggggatggtgaccaacggtctggcgctcgacgccgactgcttgcgaagtctgatggatgcggggctgagatccatttcgatcagtttcgacggctttgaggacgctcataactacatccgacgcaatccccgcagtttcgggaaggcgctcgacgcgatccggttgatcgtgagggaaccccgcttgacctacgacgtgattacgtgcgtcacctcgccgatggtcgcccggctcggagagttcaaggagctgctgatcgccgagggggtcaagtactggcgtattttctcgatcttccccgtcggccgggccaaggacgatccgacgctcacggttaccgacgcacagttccgcgaggtgctggagttcataaagcgtacccgtaaggagggacgcatcgacttgagttacgcctgcgaaggctttctgggcggttacgaaggcgaggtgcgggacgatttctaccagtgcgccgccggggtttcggctgcctcgatccgggtggacggggcgatttcgggctgtacctccatccgggccaatttccatcaggggaatatttaccgggacagtttctgggacgtgtggcagaatcgcttcgacaagttccgcgaccgcgaatgggcccgcaaaggggagtgcgccgattgcaagatgtggcgtttctgtctgggcggcggtatgcacctgcacgacgaccaggagcatctgatgtactgtcactacaagcgattgcaatagtcggaaacacaataggagagagactgtctaacaggtccctgaaattgaaaatcgtccctgtcaggatcattccgacggagcattaaaatcggacttgttaaacagcctctctttgcgttatgtccggtgaggcggacggttttttccggttcggatgttccggtcttattcgagcttatgtacgaagctcttcacttccttgcgttcccggggcagcgtttcccgggtgcggaacggctccgccagccggtcggccgggccggggtagccgagcgtcatcatcgttacaggttcgatcttttccgtgtcgaggcccagcagccgggcgcaggcttccacgtcgaagccggccatctgatgcagttgcattcccatcgaggcggcttgcagggcgatcgagatgttcgcggcgcccacatcgtgcatccagtgccggttatagacatccgtcctcgggaaattcttgtatccgcaggaaaccagcaacaccggagcatcgggcgcccaggctcgattgcctccggtgaggcactccgcgagccgggcatgagcttccggatattcgcgagtcgtatagtaatatgcccactcctgggcattgttgcaggaaggagcccagcgtgccgcttcgaacagcaatgccagttgttcttcattgacgggacgggaatcgtatgagcgggggctccatcgctcttcgatggcttttatcagtttcatatcggtaaatagtaggatgtgttctggtaatctgcaaattttgtgccccgagcattaccggatttcgggaagatgccccgccggttccgatagacggtcgatgcgcagtcgggcggccgctgcgctcgatgggcggctgtaaaaaaacttgtctgtaagctgcggtcccggttttgccgaaaagctggatgatatggcggttttcggaagaagaggggcagacctgaaattgagaactccctgatgaaactctttgtgtccgtgtggcctttcgccgactacaacggcagtttacgacgataaaaaaactttcccgtaaaggaaagattactctgatttttcgaagccccggattgcgtcgctctgtttcgctttcggacgagaccttatattgggtgtataaaaatcaaagattccgcttggccaggcggaatccttttttcttgtgtccttactttcggcgatgaatagccgccgtatgcccatcataaaaaaacctttgccttaagcaaaggttttgatttttgtcggggagactggattcgaaccagcgacctccaactcccgaagctggcgcgctaaccggactgcgctacaccccgaacaatatttttcaccgtaactgatttccctctttttcgagcctctacgcaagaagtctttttccggaggcttcttcgtcggggtagcgggattcgaacccacgaccccctgctcccaaagcaggtgcgctaaccggactgcgctacaccccgttcccaatccggggacctcttgcgaggtgtgtcccgccgattgcggaaatcagtgcgatttcggagtgcaaatataaggtcttttttgtttataacaaacttttccggctaaaattatcttttcgaagagagattcctttttcccgacttccgtttcgggaccttttcaggccggatttcgaatatccggtcgcgtttgccacgacgtaccgtccgttgtcccgggacgttttgttattgcgagcgagccgcttgcagtcggtttcgaattatttcggatgtcctcccgtatcgctgcgatgtgccgttcgtttcggatgacggttttccgtttctggcatcatctgttcgggccgtcgtcgaacagaaacctgaaatcttcgcggggccggggcatatatacgtggaatcccagttcctgcgccgtgtgaagattttccgcgttgtcgtcgatgaagagcgtagcttcgggtcgcataccgctctcttcgatcattttgcggtaaatttccggggagggtttcaatgcgtgcatttcgtatgaaagataggctttctcgaaatagtcgtccagttgcaaaccttcctgggtgaagagaacgtcccgtacgaaaggaaaaaccacgtcgttgatgttggagagggcataggtccggaatccccgttcccgctgcgtgcgcaccatttgcaacttgtaacgggggatgccggccagaaaggaggtgaaggcccggcggatttcatcgtccgcgatgtcgcgtcctgcactccgacgcacgtagtcgtagaagtcgtcgttcgtcacgtcgccccgttccaaccgtccgagaaatcctttcggatggtacgagtcgatcaaatcgtcgatttcggtgaatccgatcttgtggaattcctccacgcagcgtgctctgtcgaggtcgatcatcacgcccccgagatcgaatacgatattttcgattccttgcagcatgtcggtctgtttcgtagtgtcgttatggcctgtcggcaattatccggccgaatgcaccgggcaggacccggcttcgggtttcagtggtgttcttcgttgaaatttccgacggatttttcccggttgcaggagcttttcggtggcggccttgttcttacgcaccgttgtcccgctgtcgtggtttgtccgtccgacgtgcccgttacgtcgtttgtttgttcggtctattttcggttattcgttcgtttgcagctcttccggatgtgctgtcggggtttttatcgttgtaattccggcctcggattcggtgatcgtagtctcggcctgggtggactgcgtcgctgttgccgtcggagcggaaggttcgggatttgtcgcttccttcgcagttccggtttgcgtgagttgtaccgccgcctgttccggtacagtcgcgaggactttcgccgtcgcggaagccgatgtatccgttgtttccgtatcgcccgccgtattgccgtccgttacgtcgatgctctcttcctccataccgagctggatggcataaatatcttttcccgagtaatcgccgagttcctgtgccggaatcgtccgtaccgagatcgcggtgacgggtattccctgcgatcgggtcaggtattcgacgatcgcgctgtcgcggcggacgagaattttttcgagctgtccgacggcctggtctccgtaaagcgtgagggctttccggctgccggagagtttgctgccgtcgatgccgcgcagggcgagcagtgagtctgcgaagcgcatcacctcgtccgatttgagtttggtcgcctggatccgttcgaagtcgatcatcgacagtcgctcgcctgccggaagggtcgagttgtagcaggccattttgagattcagttctgccagtcgcccgatggccttgctgcggttgatccgctgcgtgaggccgatctgcatatcgggcttgtcgcgcagtatgtcggccaccttatccagcgtggcgtattgatccgtgttgagggagaattgcagcggatcgaccgcgatatggtcgaggttgtcgcctccgcccgtcagaaacgagaagggtgccgtcacgactttcagcaggacgttgcccagcgccttcatcacgatcttgcggtaggagaattccggggagtcgaggttgcctttcacgggcaggtcgatcttgacgtgtcctttgcggtctttgagaatgtaaagtcccagcttgagcggaatcttgaattcaggctccaggtccttgcgtttcttgtcgacctcgcattggaatatgtcgaggtggttcgtgccgttgagaaaacggttggcgatgatgttctggctgcggaacgtgaggttgccgcccgtaagggggtaggccgtgaaatgttcgcagtagggggtgaaatccttgaggttgatgttcgacagagcgaccatgaggttgtggttgtcgaggttctggagcgagcctttccaacggatatggcccgatcccgtgcgttgcaatttggcgtcgagcgtcagttcgttctgtttgctgaaatcgatgtcgcggctcgacagccggatgtccgaaatgaggtatcggaacggtttttcgaacgtgttgtccgtgaaggcgatctctcccttgtccagaagcagttcgccgacggtgaaattgagctgcgtcgtggccggttcttcgcgttcgatggttacggttgtttcaccgtcgatggtcgcttccgtttccgtcggacgctcttcgggagctttgatcagagcgagcaggttgttgccgccgccccggtagatttcgaactgggtgcggatgccggcggcatagattcggcgaatatcgtactgcatcgtgcccagattgccgtcccgcaggtcgaaattgagcgtatcgacgtcgatgatccggttgttgcggctgtcgcgcagtttcagccccgatgcggccgctatgccgtacgtgcgcaggtcgagcaggtggttggcgttgcctttcacatgcaggtcgagtgtgacgaggccctctaccgagccgatgtcgatcacctgattgaaataggccgctgtgcctgccagcgagaggttcgaaagcagcagactgaggtcgtagtcggccgtcgcctggtcatattccagcgaggtgcggagcgaaccgccccgcgagaagttgaacacgatgcccatgtccgtccgttcgtgtccggataggtgcagtcccggtacgtcgatgtcgagctcgttgaagccccacgtgacgttacgctgcatgtccttgtaagtcagctcgccgttgtgtatcttgatgtcgtcgatatcgactgtccagggtttcgacggggccttttcgaccgtgtccgcagggggcaggaaccgggtcagcaggtcgtcgaaattgaagctggtaccgtcctgatagaccttcagataaggtctgtcgatcagcacggcgtcgatgtgtacgcggttgcgcagcaggggcagcaggtgtattcgagtatagaaatttcccagcgatgcgaatgtcgtcgagtcgtccggttcgagcatggcgatctggtcgattcggagtttgccgttgagtacgttgaaccgcagtttctcgatggttatttgccggccgacgagttccttgctgtgtttttcaaggtagttttttgcgatgggaggcaaccgcagaatcgtcgtgacgacgagtactgcgaggatgccgagggtgacgagcagaatcttgatccattttttcatggccgtctatcttcttttttatcgggttctgtgttttagcgttgaagcttcatcgtgtacttgcgggcaacccggagtacgcacattggcatcagacggcagaagggtatgaaaagccggttccaccagccgggcacgcagcaacggcgtcctcgccagagggctttcaaggctcgccgggcacaactgtccggcgtgatgagcacacctagccgcagtccgatgcgctgccagcggggcggcagtccgtagaggtcggtggccacacctgccgggcagacggccgtgacacggatgttctgttcgcgcacctccttggcgaaagccaccgaaaagctccgcaggtaggatttgctcgcgctgtacagggctagtcccggccagggcatccagagcgagtaggaggccatgttgaggatatgtcctccacagccccggcgggacatttcggcgccgaacagccgacaggtcagggtcgtggtcagggcatggaggcagaggattttttcgatccgttcgacgggtgtttgcagaatgtcgcggaacgagaaagctccggcgttattgaccaggacatcgacttcacggccgagagcctgtacccgctcgaaaagttcgtgtgcggcttcgggtcgtgccaggtcgatcgggatgacctctaccgccaatccgtattgttcgtggagttcttcggctgcggcttccagtttcgccggatcgagtcctgcgaggatcagccggtatccgagttcggccagccgcctggccatgcagcgcccgatgccgctgccggcacccgtcaccagagcggtccggctccctttttcgatcgttcccttgcgtgtcattacggtagttttgccagttcctcccggatttttcggggcaggtcgccgcaatgtttgcagcatttcatatcgaccgaatacatgcgggcgatgcagtagttgcggtggtcgcactcgctgcgggtcgccgcgtcgccttcgcgcagcttgttcacgaaagccgggtcgttcacgagcgcccgagccatctgcaccagttcgaacccgctgtccagagctcgctcgattccttcgcggctcaccagacctcccacgtaaattagcggcagttgcagcgcttcgcggaattttttggcatcctccaggaagtagcactccgagaaggggaactgccggatcatgaaggggccgcagtagcggatgaaggcccgcaaccagaggggcgagtaatagctcatggtgtagatcggaatcagaccccgcatcacggccatcggcgccttgcttacgaaaccgcccgagagaacgatgccattgaccttccagcgctcgatctcgcgggcgatctcgatgctttccgggatctcgatgccgcccttgaatccgtcgtacatgttgtgcttgacgagtaccgaggtgcccgtcgcatcggctgcgttcatcacctcctcgaggcacatgcgcatgaagcgcatccggttgtcgagcgagccgccgtattcgtcgcggcggtggttggtgtagggcgagaggaactgcgagatgaggtagccgtgcccggcgtgcacctcgacgcagtcgaaaccggcggcatgagctgttcgcacggccttgccgaagtctttggaaacctgcattatttcatcccggcgcattttgcggacgggggtgtaggcgtagaggttgaatccgctcgaagccccgatgggaatctgtccggcggtcgagtagtgggtcatgttgccgcagtgaccgatctggatcgaagcggcggcgccttccttgtggatggcgtcggtgatgtcgcgcagcgccgggacgatctccgggcgcagccagagctggctcttgaacgagagcccgctgcggcagacggcagcgtaggccagcgtggtcatgccgataccgccccgggcgacgctcacgtggtagtccttgagctgctgcgtggggctgaagtctttgcccatcgattcgaaggctgccgaacggatggtgcggttgcggagcgtaacctgccccagacgatagggcgtgaagagtacggaatcctgcaaattactcataattgaaaacttaatagatgaaaggtatgatcctctttcggtgcagggaggtgaattcctgcccgaactctttttcgtatcgtttgtaaagcgaagctgcgcggggggcgaggttggcgaaggtccaccaggcgaatactgccccggcccatgaccacgaagcgatggcgaagcccacccattcggtcagctctccgaaatagttggccgacgaaacgtagcggaacataccgccccggggaatgtaatggcgtgtatcgcccggcttgcgcagatggcggatgatgtagtcggagtggaggttgatgaccatgcctgcgacgaagagtgcggctccgatgtaaaaatagggtttggaaaaccagccgtcgtaatagtcggcaggggagatatagaagatccagccgccttgcatcagggcgttgagcgtattgaagagcatgcccattcccacgatgccggccggcattttcgaattgccccggatcagtagcggaaagatgaacgcccgttgcaggtagtgtccctggaacaggatcagcagggccagcggcgccgcctcccacgtgcggtcggagaggagccagagaacggtcatggcgatgaataccggacattccatcagcacccagccgatccggttcgggatcggaaagccgtatttacggttgaagagatagccgtatccggcctcgaaatagtggagtgcgatgtaaaccgccaaggccagcagggccatgacgatcaaaaaaatgttaaaatatgctgccatgccgcaaaagtttttacctattttataaagggtggataaaaattattacaaaggtagtgaaaatgagaacagaataaaacaaatgagttcgttttttttatgccggaggctccctgtcttctgcgggggcgataaaaacgggaacagagtccgaccggtgcgtccggcggctttgccgagtgcgtccgacctttccgaaagtatgtataatcgcaggattccgggtcgttgaatttcgttatttcggggttttatctgcgaatgtgtcggatgttcttctgaaaatgtttggaggcgggattgcctcctggcatagtttgtgtcattcttctgttacgaaccaaaataattatagcgtatgaaccagaaacgaaacaatgatgaactgctgacgacagttttcggatcgaaagaagtgctcgagcctgctcccgccgatgtgatcccccagggaatgatgcgcccggaaattgcatatcagatcgtcaaagacgaaacttacccccagactcagccccggttgaatctggcgacgttcgtgactacctacatggacgaatacgctacccgacttatgaatgaagcaatcagtgtaaactatatcgacgaaacggagtatccccgcattgccgttatgaatggacgctgtatcaacatgatcgctaatctttggaatactccggagaaggcgcagtggaaggcaggcgccctcggtatcggctcttcggaggcctgtatgctgggcggtgtggctgcgtggctgcgctggcgcaagcgtcgccaggctgcgggcaagccgttcgacaaaccgaatctggtgatgagcgccggtttccaggtggtatgggagaagttctgccagctttggcaaatcgaactgcgcaccgtgcctctgacgttgaagaacccgacgctggaccctgagcaggcgctcgccatgtgcgacgagaacacgatctgtatcgtcccgattcagggtgttacctggacgggtctgaacgacgatgtcgaggcgctcgacaaggcgctcgatgcttataacaagaagaccggcttcgaaattccgatccacgtggacgccgcttccggcggtttcatcctgccgttcctgaatcccgaggtgaaatgggacttccgcctgaagtgggtgctctcgatctctacgtcgggtcacaagtacggtctggtgtatccgggcctgggttgggtagtctggaaggacaagaagtacctgcccgatgagatgtcgttcagcgtcaattatctgggcgcgaatatcacgcaggtcggtctgaacttctcgcgtccggcggcccaggtgctgggacagtactacaatttccttcgcctgggattcgagggctacaaggagattcagcagaattcgatggacatcgccacctattgccacgatcagatcggcaagatgaagtgcttccgcaactatgccgacaagctggtcaatccgttgttcatctggtatatgaatcccgattacgacaagaaggccaagtggacgctctacgacctgcaggctctgctgcagcagagcgggtggatggttccggcctatacgatgcctgagaacctggaaaatctggtcgtaatgcgtgtggtcgttcgccagggtacgtcgcgcgatatgatcgacatgcttatcgacgacatcaagaacgctgtggccgagcttgaaaagctggagtatccgaccgattcccgtatcaaatacgagaagcagatcaagcagaaaggccgcgtatttacgcactgatccgcagaaactcgatcctgcatccgccccgtcgaaccgctgcacgtgtagccggggagagtcgatggttgcgaccgcgatccgcctgtcccgattggtggcggtgccgatgcggtgggttgggattcccgctgatcgcccggcttccggggttagcctgtccccgtgaccgaggcattgcaagctccgcccgtctgaattttcagacaggcggagcttttttgctaaaaaatcgttgcataattaaaataaaaatgatatatttgggtaatgaaaaaaaactatttaccaaccaaactaaaacctttgtatttatgaaaaaatttaattacttattcggctggcttttttgcggggcggcgcttctcggttttggatgcgacgatgacaagacggatgtcccccccccgacggttacgtttgaaatcgcgacgccggaagcctcgtctaattccgtttctgtgacggttacgccgtcggacgacaaaacgacctattttgcgggagtgacggaatcttcctccgtcgaaggacttgccgacgaggagcttgttgccgaaatggtcgcacgttcggatttcgacaagtgtctttatatgggcaagaaggatgttttggcaaccgggctgaaggctgataccgattatacggtggtggttttcagctatcagaataaagaagtcggagctgtggtcaagaagaccgtcaggacgcagaaggagggtgaggagccgacgccgggcgatttcaaaatcgagatcacggtaaccgatatcacccacaattcggctaaggtgaaggttacgcccagcgacgatacggtggactactacgtgaacgtgtttcccaaatccgaggtcgagcgtgacggaaagatgcttgaaggctgggagttcatcgaatattacggacaggacccctacatcgggaacaaaacccagaagggtgtgtacgagaggtcgctatcgggactttcgtcgagctactcgtacgtagtggcggcttacgacctttctcaggatgaggaagtcgtttattatgagttcctgacgaccaaggctccggacgttcccgaccagttccagattacgaacatccagcctacgactacgggggtgacctttaccgtgacaccccagagtgcggacgaatggtattgcgcctggattacgatgaaatctacctatgagagtttcgagccggaatcgtatattcagggcgtttattatggcctgaacaatattgcggttgggaagcagatgacgatgtcggactacgtgaagtcgatcgccaagcagggtacggcagagtggagcaattatgacggcgatctgaagcccaagactgattacgtgatcctggcgttttacgtggacccgaacaatgaagaccagttaaaggtatacgactatgcatatacgaaggcggaattccgcacggagactccgaagaccgaaatttcgttgacgctgggcgacatcaagaacctgacggacaacggcgacggtactgccgaggtaacggttcatgtcaaggcctccctggccacatcgtatcgcatcggcgctcacacgcagaccgaaatcgatgtggaaatcgcgaatggttacggccctgaggattggggggacttttggatcagttggcgtccctcctccgatgtcgaaggcatttgttcacctgaaggcgccgatgtcactgcgctcattcctttcgttgcaggacagggatattgcctcattttccgagtccgtagtgaagatggcaacacgaaaaccgagtacaaacctttgaataaataacattcggatacatattccggtccggtatttctcggcgaatgcaggttttctgtttcatctgggattcggagaataatggtggggagatgccggaccggatttttctttgaagttcatgctatgaaaaaaacgatattcgagcactttggattctggttgcgcggagttgtgtgtggcgcgttgctcctgtcggcggcggttgcatgcagcgatgacaacgacgatcccggggcagcggctcccgagatcactctggagagcgtttcgacgggtcagaccgaattttcgttccgcctgcggacgaatgtggatggggcgtacggttatcaggtcgtgaagcggacgcagactgacgggatggagaagcccgacgctgcatcgcttttcgacgagcacgccggtaccgtgaataaagagaccacggtggccgtgaccggattggagacgggctgttcctatgtgctttatgcagccgtgaaggcggggacgctgtatagcgaagtggcggagctcgcctttacgacgggggcgaactcgagcgaagttatcgaggtgtcggacatcggctccgaccggtttacgttctctatccgttgtgagggtccctactttttcgccgcgattccgacggccacgctgaatacgtataccatcgaggagtacctcactgaggcgggttgcatcggccggggcgaggccgaatacgactgggtcgacggaggggaattctccgccgaaaacgggactttccccatgaaggacatcgcgggtgttccgtacgtcattctgatggcgccctgcgacgcatcgtacaatatcaccggggagcctcagcggctggatttcgagacgctgccccgccagggtagcggtgcggaagtggaggtggaattgaccgaaatcgcctctacgtcggtgaaggtcggaacctcgcctggcgaaggtgtcgccgaatattacgtatatgtccgtgacaaggagtggtatacgaacatcatcgagaacaacggaggtgaggcgatggcgatccatatgatcaagtatgccaccgatgcgggactgggcaggaaatacgaggcggtcgcgagcgaagtgtgggagggtctgaaaccctccaaggaatattactgcggcgtggtgagcgtcgatttttccgggggcgagaatcttcagttggtaccgttcacgactgaagagtcctcgggacgggtgcctctgctggaggtcgaggcccgtaaatccgatacgaatccttccgagacgctgaatctccgcattcggagcgatatagcctatctgggacgttacgccgttttggccgccgccgaggtaaaggattacgaagcgcagggtaagggtgacaaggaaattatttcggacgtaggcaccgacctgaacatccaggagatagagcaggtcaatacggcggaaggttacgatatcgaggtggaatttctctatccgggcatggagtatgtctgcattgtcgccgtacgttcgttggaggatgtggaagtttataaacgggtgacggtgcggatggacgactggccctccgaggcgcgtgtcgagtccgagttgttcgacgtgcttccgggtacctggacgatctcctattcctatctggactataatgatatgcctcaggagattaaggatgtcgaagtgaagatcgaagccggagtcgatgataagacttgtaaggagtaccgtgctcggaatatgctggtgctgaccggctatccgttccaggggggcgagccgctctattattctccggccgatttgatgagagaatcttcttattacagcgcggcacctgaactggcttaccgtgactacggggccaaaatcttcttccacattggagagggcgatgaggtgacggtgccttcgtcgaagagtgtttatctgtataactggggagacaggccgcttcttttcgtgggcatggattacgataagtaccagctcgcgccggcatcgtttccggtggaggtatcgtccgaccgcaggacgcttacgatcaagcagtacgtatcgggtgccgagttcgaatacggtgtataccggccttcagtggtggaggatggagtcaagttgaacgtggctgtgtcggatatcgtgctgcgtaaggtcgattgagtgatgcggcagcaaagggctgtcccgattggtggcggtgccgatgcggtgggttgggattcccgctgatcgcccggcttgcggggttagcctcttcccgtgaccgaggcattgtaagctccgcccgtctgaattttcagacgggcggagctttttttgcaaaaaatcgttgcgtaattaaaaatagaatgatatatttgtaatatcaaaataatatcataaaaacaggatggttatggaaaagggaaattttgtctattcgggttggcgggccaacggcttcgtcgcgctcgtcgggttgctggtgttgatcgccggaggtatcgcgctgtgcgtgttcggcagcgatgtaatggatccgcgcattgggctgcggactgcgatgctggtttgcggcgtatgcctgttttttataagtatgttctgtttcaagggctttatgttgctcgaacccaacgaagcccgtgtcgttatgtttttcggcaaatacaaggggactttttacgaaacgggtttttggtggatcaatccctttatggggcgcaagaaaatttcggtgcgtgcccgcaacctgaacgtcgagccgatcaaggtgaacgacaagaatggtaatccggtgatgatcggcttggtgctggtgtggaaaatctgtccggacgagatctaccgggccgtcttcgacatcgacgcctcgacgatgggcggcaccgatcttgcggtttcggcttcggcccgtatgaaggtgctcgaaaacttcgtcagcgtgcagagcgatgccgcactgcgtcaggtggcggggtattatgcgtatgataacaacggcgtcgcagatgacgaactgactctgcgttcgaacagtgacgagatcaacgatcagctcgaagccaagctcaacgaccgtctttcgatggccggtatcgaagtgatcgaggcccgcatcaactatctggcctacgcgccggaaattgcagccgtgatgttgcggcgccaacaggccgatgcgatcatctcggcccgtgagaagatcgtcgagggagccgtcacgatggtcaagatggctctcgaccggttggccgacgaccggatcgtcgagttggacgaggagcgcaaggccgcgatggttagcaatcttctggtggtgctgtgtgctgacgaggctgcacagccgatcgtcaatgcaggtacgttgcatcattaggatcggacaatggcgaaggaggcgacgaagagttttgtgctgcgtgtcgatgcggctacgatggaggcggtcgagcggtgggctgcggacgagttccgcagcaccaacggccaactgcagtggatcatcatggaagctctgcgcagaagcggccgcctgaaaaaatcacgggtcgggaaaccggagccgaaacccgaaaaagagtgaatctatgcgaatcagttttatgcggtggcgtcccggcagcgacggccgggagcctcgggagcggagaaaatggctcgaaataaacggtgtgccgagtagggccaggtttcgcatgtttatccgtaacagattgtggatcggacttcctcccgctttcgtggcagggttcggagtcgtattgctgctgctggttttcggcggagaatcgactccggagcgaagcttggtgcgggcgtcgatcgccggcggtttatgcgtattcggttggatattgggcgtctgggccgcaacgggacccgattcggagccggtggccgaaaactcggaacaggcttccggggatcggtttgctccccgcgggttgcgatggtggctgtgggttctttgcggtggggctgcgatatgctatgccgtcttttctccgagtatcggacggatcgtcgaaggcgaacgcacggtgttggagggtgcggcggaaatcgtcagtaaagtattgacggtagtctgtgtgatcgttcctgtttggttggcggaacgagcccggcggtaacttcgtccggccggatacgcagcgcgggtacggtgtttcccggccggtccctacctgcggttttcgacactcggctgttgggcgcccgttcgggaggtttttcctggtgtcactccggcggaacggatttttaggacgatgcgggatatttttctgaaatttacgctatctttaacctgatgaaaaagatcgttgtttttacgggtgccggcgtgagtgccgacagcggactggctactttccgcgattccgacgggctgtgggccaactaccgaatcgaagatgtctgtacgcccgaggcgttgcgcgacaatcgggcgcaggtcgtcgatttttacaacatgcgccgccgcgagatgctcgggaaggagccgaatgcgggccatcgtgctattgcgggcctggagaagtgtttcgatgtggaggtaattacccaaaatgtcgataatctgcacgagcgggccggctcttcgcgcgtcacgcacttgcacggagagctgactaaattgcgttcgtcgcgcgatcccgaattgatcgtgctcatcgacggctgggaacagcggctcgatgcaaccgctccggacggctccctgcttcgccctcatatcgtctttttcggcgaggcggtcccgatgttcgaacgggcggccgagatcgccgggacagccgatctcatggtcgtagtcggtacttcgctggcggtctatcccgccgcatcgctggtgcgttacgtgcggcccgatgtgccgatttttctggtcgatccgggaaatcccgatacggcgatgatccgcaatccgctcacccatatccgttcacgtgccgccgagggcatgcccgaactggcggagcggttgaagtcggaattctcttgaatcacagcttttctgtctgtcgttttctcgcggtcggaaggcagtcggttcgaaactcttcccgcatgatttgccgggttgcgccggagggatgggacgaccttcgaggattgtaaaacgataaggagcggtaatccgctccttatcgttttattgtttcttttgaaaatttctccggaactatcggtaggtgatctcgatcgttgccgggtttacgatgtcgcgtattttggttttcgtccggtttttgatttcgtatttgtaaagtttttcttcttcggggaactcggggtggttcatagcttcatcgatgacttcgttgccgactacgatgtcgtattctacctgatactcctcatacgggacgtcgtaggatatccgctttaccgcattgtcggcatccgtttcgatgcgcagtttcaggtattcgtcctctccgcaggcggattccgtagtggtgtaggatttgtgtagcgtgacatttggtgtgggataagcaccctcattccctcccacctcgtcgtcctcgtcggcggcagtggcagtggttatttcgggcaggcaatcgccgtagtttccggtcaggcgtaacagggaaaaaatagcgctggaagtgttttcgaatgagatgcgaccgcccattgcatacatgtagaaatcgaggttgctccggtcgttggcataacggtgggggtagcactcatcggccgggagcgaatactcccagggctggtagtccgggtcgtaggaggcctcgtaactgtcgtagtaggtgtagcgcgtcagcaggccgtccgtgtagtagaatttgttttcgctgtattgattcaggccgctggaagaggaataggaatacttggatagcaaggaagagagacgtccttccggggtgtatgtataggtctcctgcccttcgagccggggtgtcccgttgtcgtagtcgtaactcgaagtttcggtgatgcgtcctttcgcgtcggttttggcggaaattttgtagagaaggcgctccgcctcatcggttgtccggaccgaaacttcgttggcgatcgtatagtcgaatgtatatatctccgttccgttgtctttataggagtattcgtcggtcgagtggtagttttcggtaattcgggctactctgttttcttcgtcgtagtcgaatgattgcgagacggtcgtcgtcgctccctcttcgcggttgtctgtgagtttgtaatccacccgggcgacgtatttgtaatcggtcggaggcgtgtctggatcatctggatcatttggattgtccggattgtctgaaccgtgtcccttttgttcgatttcgatggcgatgcggtaagagccgcagacgatcgtgattttggcgaagcgcgattcggaagagctgttggattcgaggatttcgatggtgatctgcgctttgccggcatcgccgctgtaggcggacagacggagccacgaaggttccgtgcgcgtcgtctcttcgagggttgcagtccatgcttccgctgccgtgaacgaaatggttttcggagcggtttgatcagcgtcaaagatttgctccagtaaagagctgtcgatcaggatggaagaaagccccccccctcctcgggagattcggtgcaggctccgagcatgacgaatgccagcagagctgcgaatagttttacgtgtttcattgtttaggaatttaagtgatattaagtgtttggttcaatgccgtatgacaggaacggttgctgcgtggtccgttagttcttgtttttgaagtaaagctccagcaattcgtgcgccgcgacgaacgagctgactttggcgtcgagcactttttgctcgagctccgtgatgcggggttcgatctgcgggttgtggtagaagctgttcttcaacacctcgtcgatggtttcgtacatccaatacttgttctgacggttgcggttgtgcgtgaagtatccgttcgcctgaatgaagtcgaggaactcttcgacgcctttccacacctcctcgagtcccgtttttgtgtatgccgagcaggtatatactttcggacgccaacccgattccgggaccgggaaaagacgcagcgcaccctgatattgcgttttggccagttcggctttgtggatgttctcgccgtcggccttggtgatgaccatcatatcggccatctccataatgccgcgcttgatgccctgcaattcgtcgcccgcaccggagatctggagcatcatgaacatatcgaccatcgaatgtacggccgtttcggactgtcccacgccgaccgtttcgatgaagatgacgtcgaatccggcagcttcgcacaggatgatcgtttcgcgggttttgcgggctacgccgccgagcgacccggccgaaggggaggggcggatgaagaccttgggattggacgagatgctctccatgcgggtcttgtcgccgaggatcgaaccgccgctgcgctccgagctggggtcgatggccagtaccgccagcttgtgcttgagcgaggtgaccatattgcctacggcttcgatgaaggtcgattttccggctcccgggacgcccgtgatgccgatgcgtaccgatttcccggcatgcggcaggcacttttcgatgatctcctgcgcctgggcatagtggtcggggttgctgctttctaccagggtgatggcctgcgaaagcgtcgtgatgttgccttgaagaatgccctcgacgtactcttcggtggtgagtgcacgctttttctttcggacgaaatagggattgactacgggttggttttccacaccttcggttacggtcagggcgcactcgtggtgggtgtcggcatactctttttcgtaatggtttatcttggtgaatgacatgacggaattaacggtattactggtgtttattgaactattttctggatgaatgaactggtcatactctgcggatttcccatccacagcacccggttcttggcatcgatcagcacgctgaacggcacgaaatcgactccgaaactgccgaatacttttttgtcgtgatcgagcgccacgccgatccgttcggagatgtagggcgtgagaatcggggcgattttatcagaatcttcctgtgttatgatgataatgcgcagtttggagcctaatttgttagatagatcccggagtgcgtccagcgacgccgtgcagcctttgttcgacgagtggaagaatacgaggtacgaaagatccgctgcggccggattccgggatgcgagccaagtgacgcttttgagttcgggggcccgctctccgatgacgatgttctgtgcatgggatgcgcccaacgtgcaaaaaacgacagtaaggagtaaaagaactcgtttcataggcatcgtaatttttagcgaagatagtgaaaaaaaataaataaagaccggttttctgccggaaaggagatttatattatggagaatatatggggttcgcaacgtaagacggccaatatggagcgaggaggccttcgggaggagaatagaagggcgcacgaagaggatgaacgttttcggataacggccgtgaaagcggccggacaggtgcgtcagcgtatgcgcagcgcgaccggggagtcggatgaggtcatccgtcgtaaattcatgctgcccgagcggtatatcctgaccttgatgacggtcgaaacgctcggacaggagcggatgctgctcgatctgatggccggcggtcggctcggtgcggacctcgtgctttgcggtcgtcgttcgttctatgccgatatgttgcttcgcaccgcccgcgaccgtcgtctggcgctgcgtaccaattttatttatgaatactcgcccgaggagttgagcgcttttttccgcatggcagacggcctggtttacctgccccggaaacgggggcgggtgcagcctgtcgtcgaagcgctctatgccgggattccggccgtgctctccgatacccgccgcaatcggctgactgccggcgatgcggcccattatatcgcgtgtccggagctcgatgagctggccgatacgctcgatgcgatcctgtccgattccgggttgcgtcggcaggtgcagggatgctgcctgcgtcgtgtggaacgatggaaaactcccgacgataacttgcggaccaaggagtgataatacgggagcaattaaccgatcgatagttgcacgcttcggattaaatcgctacttttgtcgatcgaaaaatctcattgaaagttttgtaatcctcatcggagggcaatataatgccggataagatgactgggtaaaaccaatcgcttgtccggtgttttttgttttgtgctgaatgtgcaagtagttgaatttagtatgattgtgcatggaaagagatgctattgatttcggttcgctgaaggtttcggtattgttccgccgtctgtttattccgactttgtgcggtatgctcagtatttcggcagttacggtggccgacggtattttcgtagggcagggcgtcggcagcgacggcatcgccgccgtgaatatctacgtcccgctgctgatggtctttcagggaatgggcctcatgatcggtatcggctgctcggtggtggcttcgatccacttgtcgcagtcgaagatccgggcggcccgcctgaacgtcacgcaggcgatggtgttcgtgacggcggtgaccttgctgctgtcttcggcgattctgcttttccccgaccggacggctgtgttgctgggggcttcggagcatctgctgccgttggtgaaggattatctgttgtggtttactccggcattggttttccagatgtggacggccgtcggacttttcgttatccgtttggacggggcgccgaagctggcgatgtggtgcagtgttatctcggcgttgctcaacgtgttgctggactggttgtttattttcccgctggggtggggtgtcatgggggctgcgttcgctaccgcgatcagtgtatccgtcggcggcggtatcgctttgtggtatctgctgtgccgggcccgttcgttgtccctctgtccgcttaagggcagccgcaagagcttgcgcctctcgttgcggaatgtggggtatcagtgtcgtatcggctcctcggccttgttgggcgaagcgactcttgcgaccttgatgtttaccggaaatcaggtgtttatgcgctatttgggtgatgacggcgtcggagcgttcggcatcgcctgctactacattccttttgtgttcatggtcggcaacgccattgcgcagtcggcacagccgatcattagctataacttcggggcaggcgcttcggggcgggtgatacaggcacgacggatcgcattggcaacggctgttgtgtgcggtatgaccgcgatgggattgttcgtctgctgtccccgtatattggtcgggttcttcctcgataccgatacgccggctgcccttatcgctatcgaagggtttccgttgtttgcgtcgggtttcgtctttttcatcgtgaacctgatcgtcatcgggtattatcagagtcttgaacgggtaagagccgccactacgttcgctttgcttcgaggcttcgtccttttggttcccgctttcctgctgctgccccgtgtggccgggatctccggcatctggctcgccatgccgctctcggaattgctgacgtgtgctgtcatcgcggtattttataatctgcggcggggtttcggccttcggttttcttgatttcaagcggttgtccttcacggataaccgctttgtttttccgttttttccctgcatatgccggaaagtcggaatagttccgactaaaatcgtttttttgttggcttattcagatatttcatctatttttgtatgattttttgaggattccgaaaattcaaattcaacgatattcaacttaattaaatctcttgaaattatgaaagtatctcacattgagcatcttggcattgcagtcaaaagcctggatgagtcgattccctattgggaaaacgtactgggtctgaaatgttatgcgatcgaagaggttgccgaccagaaagtccgcacggcgttcttcaagctgggccagacgaagatcgagttgctcgagcctacgtcgcccgaatcgaccatcgccaagttcatcgagaacaagggcatcggtatccaccacatggcactcgcctgcgagaatatcgaggagcagttggccgatgcagccgccaagggcatccgtctgatcgacgctacgccccgcaagggtgccgagggcatgaccatcgctttcctgcatccgaaatccacccagggcatcctgacggagctttgcgagaacaagaataaataatttaacagcatattttcgattatgagtgaaattcagaaccagatcaaccagctcatcgagaaccgtgagatggctcgtatgggcggtggtcagaaggcgatcgacaagcaacacgagaagggtaagtacaccgcacgcgagcgtatccagatgctgctcgacgagggtagcttcgaggagttcgacatgttcgtcacgcatcgttgctacgacttcggtatggagaagaagcatacgttcggcgacggtgtggtaacgggttacggtacgatcgaaggccgcttggtctatgtctttgcccaggacttcaccgtgacggcaggttctctgtcgctttcgatgtccgacaagatctgcaagattatggatatggcgatgcgcaatggcgctccctgcatcggcttgaacgattcgggcggtgcccgcatccaggagggcgtgaacgctctggcgggttatgccaacattttccagcgcaacgtgatgtgctcgggtgtcattccgcagatttcggccatcttcggtccctgtgccggcggtgcagtctattctccggcgctgaccgacttcatcatcatgaagaagggttcctcgaatatgttcctcaccggtccgaaggtcgtgaagaccgtgacgggcgaagacgtgacgcaggagcagttgggcggtgccacgatgcatacgaccaagtcgggcgtagctcagttcgccgtcgaaaccgaggaggaaggcatccagttgatccgtcagttgctttcctatatgccgcagaacaacatggaggatacgccgatggtcgtctgcactgatcagatcaaccgtctggaggattctctgaacgagatcattcccgacaatccgaacaagccttacgatatggccgaggtgattcgtgctatcgtcgataacggcgaatacctggagtcggctgccgatttcgcaaagaatatcatcacctgcttcgcccgcttcaacggacagagcgtcggtatcatcgccaaccagcccaagtacatggccggtgtgctcgacatcaacgccagccgcaaggccgcccgcttcgtgcgcttctgcgatgccttcaacattccgctggtgaccctcgtggatgttccgggcttcctgccgggtacgacccaggagtacggcggtgtcattacgcacggtgcgaagctgttgttcgcatattgcgaggctaccgttccgaagatcaccgtgacgctgcgcaaggcatacggcggcgcttatatcgtgatgtcttcgaaacatatccgcggtgacatcaactacgcatggccgacggccgagatcgctgtgatgggtgcgagcggtgccgtcgaggtgctgcatgccaaggagctcgccgctttcgagagcgccgaggagaaggccaagttcgtggccgagaaggagcaggagtaccgcgacaagttctccaatccctacaacgccgcccgctacggctatatcgacgatgtgatcgagccgcgcaacacgcgtttccgcattatccgcgctttgcagtcgctcgcaaccaaacgtttgcagaatccggccaagaagcactctaatattcctttataaatcgacgaattatgacacagatagattggtcgggtatccttacgatcacatgcgtcgggttctgcctggtgattgtcatgctccttctgctggtctttgtaatgaagggcttcggttctttctttacgcatcagcgcaagaagcagtcaccgtcgcagacggaattggacgaggagaccgtagccgccattatgacggcgctgaagctcttcggcagcgcccgtcacgaccgggaaaccgagatgcttacgattttgagcatcaagcgggcttactcgccctggaactcgaaaattcacggattaactcaaatgccagattacagaaaataagttatgaaagactattcattgaaaataaacggaaatcaatacgacatttcgattgaggacgtgaacgaagaatcgacgatggccaacgtcaccgtcaatggtgtcgcttacgaggtggaaatcgtcggcgagcaggccagcaagatgaagaaaccgcaggtcgttcccgctccgaaagctgcagggctgtcggtgactccgactacggctgcgccttccgctcccaaagctgcacaggctgctgccggcggtcccggtttgcaggtgaaatctccgctgcccggtacgattctctcggtcaatgtgaaggagggcgaccgcgtcgctccccgtcaaactcttttcgtgctcgaggcgatgaagatggagaacaacatcgatgccgaacgcggcggtgttgtcaaatccatccacgtccagaagggcgctaccgtgatggaaggtgatctgttaatcgttatcgaataagtgatatgatgttaacagctggatccatttcattgtccgacagtctggtcgattttttcaatcagaccggattcgcaggggcgacctgggggaatatagcgatgattctcgtcgctttcctgctcctgtacctcgccatcaaacacaagttcgaaccgctgctgctcttcacgatcgctttcggtatgctgctgaccaacctgccgggagcgaatatgttccattccgaactgttcgccggcggacatatccactggggaaatttcatccaggatgccggattgctcgattatctttatctgggtgtgaagctcggtatctacccgtgtctgatcttcatcggtgtcggtgccatgaccgatttcggcccgctgatcgccaacccgaagagtttcatgctcggtgctgctgcgcagttgggtattttcgtgaccttcctgggggcttacgcgttgggcttcactcctgctcaggccggtagtatcggtatcatcggcggtgccgacggtccgactgcgatcttcctgaccgcccgcctcgcgcccgaattgctggggccgatcgccgtggccgcttactcttatatggccctcgtgccggtgattcagccgcccatcatgcgtctgctgaccaccaagaaagagcgtgaaatcaagatgtcgcagctgcgcccggtttccaaaaccgagaagatcctcttcccgatcatcattgccgtaatcatctcgctgctcctgccgagcgccgctccgctgatcggctgtcttatgctgggtaacctgatgaaagagtgcggtgtggtcgatcgtttgagcaagaccgtgcagaacgagctgatgaatatcgtggtgattttcctcggtattaccgtcggtgctacggctaccgccgaagcgttcatcaatgtccagaccttgagtattctggtgctgggtgtgcttgcgttcgctctcggtacggccggaggtttgctgcttgccaagtttatgaacctcttcctcccggagggcaagaagatgaacccgctgatcggctccgccggtgtttctgcggttcctatggcagcccgcgtatcgcaaaccgtcggccaggaggccaatccgagcaacttcctgctcatgcacgccatgggtccgaatgttgccggtgtcgtcggctctgcggttgccgcaggtattctgctgtcgttcctgggatagtccggggtttctatagattgaagagggccgttttgcagacggccctcttctttttcctgggaaagaaggttgctgacgcctatatcggttgcggtgtgcctattggtaattatattttttaagaaacccttattcgacgatcgcagcacgaatccgacggtcgcttattcgctgtcggtggtcgcgtttataattcgcccccttccttgctccttttcttcggaaaggacttggtccgttgcgcatccaaaaagctccgctaacagctatgattccatgcttgaaatttgatcgtgcggcttttggtattgtaatggattccgggatcagaccggggcggttccggctgcttttccggttgcgttgttccgtccggctcctgtttcttgcgatgaaacgaataaataattgatattcgagtgttttctgtcgcccaactttttgagtcgtcttaaaattccgcctcgggaaaatgcaaataaatttgcttttgcatccggctttttatatctttgtagaagataggattcggttcggaaaccgggaccaagttcccgttttctctcggctttcactatttttgtttatgtagaaaccaacagacagatgctatgaaaaaatttctgttttatgccgtgagcctgttgctggtgttgcccgcgatggctcaaactccggccgatgccccgggtacgacgacttcgacacctccggccgatgaactggtcatttcggatggccaggtcgcacgtttgaaaaaagccccgtcgtttaagaacaaagggttcgaaaagtattggaaatgggtgctttcgcgcgtacagtatcctgccgatatggaagagcagaaggtcgaaggagtggtgcaagtccggattatcgtcgaaaccgacggatccgtgactgtggacgaagtgcttgcttcgccccatgagaagctgaccgaagcggttacgcgggtggtcgagaattctccgaagtggaccccgggcatcatgaccgacaaggagtccggtctggattatcccgtgcgggtttcttacgttctgcccgtggagttcaaggtgcgtccgcaaaaactggtcgatccgaccatcggacgttataacggacagaagaatttcaaaccttacggtagttgatacgctttctgcgtcggtccggtatcttgttgcaggtgcgctgccgactggtcgattttctccggtgaccgccggggatgcgtaaaaaaaccgtgcttggcttcggacgaaagaagccgggcgcggttttttgttgtaaaatgtgtaaatggcttttttagaatatattgacgttattttttcgggtgttttgctttttgcggattttcttcgtatctttgcgcacccgtatagtgcgggaggttggataaataagtattaattaaacgtaaacaaagtggattcattaagctacaaaactatctcggcgaacgccgctacggttgacaagcaatgggttgtcatcgacgcgaccgacgaggtattgggacgtcttgcatcgcaggttgcgaagatcctccgcggcaagaacaagcctagctacaccccccacgtcgattgcggtgattatgttatcgtcatcaacgcggacaaagtgaagctcacaggcaagaagatgaccgacaaggtctacacacgacacaccggtttcccgggaggtcagcgtttcgctacgccggccgattacctggcgaagaaaccgacgtttctcatcgagaaggctgtcaaaggcatgctccccaaaacgcgccttggcgaagccattatgaagaatctgaaggtgtatgccggcgccgagcatccgcacgccgctcagaacccgaaggcaattaagttaaacgagattaagtaagaattatggaagttgtaaataccgtaggtcgtcgtaaggctgctgtggctcgcgtattcgtgaagccgggtaaaggggagattacgatcaaccgcaaatcgctggaagtctattttccgctcgacatccttcagttccaggtgaagcagccgctgctggctaccaacaccgcagagaactacgatatcaccatcaatctggacggtggcggtatcaaggggcaggctgaggcggctcgtctgggtatcgcacgcgcattgtgcgagatcgatgccgagttccgtccggttctgaagaagaacggattcctgacgcgcgatccccgcgaagttgagcgtaagaaacccggtcagcccggagcacgtcgtaagttccagttcagcaagcgttaatcgtacgaccgaatttcggcaagcacgattcaggttacaaaccggcaagactacctatatattattatatcggctattacttacaggttgcctgatcgcggaaaactctccggattgaccgcagttcactaccgggagagttgaagaaaagagaattaaaattaaaccattgaattaaaatgtcacgtacagattttaatacattattggaagccggcgctcatttcggacacttgaagcgtaagtggaatcccaaaatggctccttatattttcatggagaagaacggcatccacatcatcgacctgcacaagaccgtgctgaagctcgatgaggcggcaaacgcactcaagcagatcgccaagagcggtcgccgcgtgttgttcgtcgccaccaagaaacaagccaaggaaatcgttgccgaaaagatcgcagctatcggtatgccttacgttacggagcgttgggctggcggtatgctgacaaacttccccaccatacgtaaagccgtcaagaagatgtccaccatcgacaaaatgaccaacgacggcacgttcgataatttctccaagcgtgagaagctgcagatcgcgcgtcagcgtgcgaaactcgagaagaacctcggttcgatcgccgacctgacccgtctgccggccgctctgttcgtcgtggacgtgcagaaggagtccaacgccgtgaaggaggccaagcgattgaatattcccgtatttgcaatggtagatacttgttgtgatccaaccgacattgattacgttatccctgcaaatgacgatgcgaccaagtcgatcgctgtgatcctcgacgccgtgtgcggtgccatcagcgagggcctcgaggagcgtaagctcgaaaaagagaaggaggcccaggagaatgaggctcatgagggcgatgctcctgtgaagaaggatgcgaaacctcgtatcaagaaagccgtgaaggcttctgtggatgctgaggaggctaccgttgccgaggttgtcgctgcgaccgagcagaaagcggaataattcgcacggagattatggacgtttccgtcccgtgcgaagattgcccgagcgatccgagacggtcgggatacggaaacgcagaacgaagttcaacgaaattaaaaccaagactatggaaatcaaagctgcagatgtaatgaagctccgcaaaatgaccggtgccggtatgatggactgtaaaaaggcccttgccgaagccgaaggtgatttcgcgcgtgcccaggatatcatccgtgaaaagggtaagctggtcgttgccaagcgtgccgatcgtacggccaccgaaggtgtcgtcgtaacgaaaatcgtgggtcagaagggttatatcctctgcctggcttgcgaaaccgacttcgtggcgcagaatgcggagtactccgcttcagctaacgcgatgctggacgttgccgtgaaaaccgatgctgcggaccgcgatgcgctgctggcagccaagaatgccgaaggccgcactgtcgaggagatggtgaccgaaaaatcgggtcagaccggcgagaagatcgagctggcatactatgcccgtatcgaagctccctactgtcatgcgtacgtacacttcaacaagaagctcggtacgcttatcggtttcaacaaggtcgttcccgaggaggtagcccataccgttgccatgcaggcgaccgctatggctcccgtttcgatctctgaggccgattgcccggccgatgtgatcgagcacgagcgcaagatcgctgtcgaggccatgaagcaggatccgaagaatgccaacaaacccgaggctattctggagaagatcgccgagggtaagatgcgcaagttcttcgaggagaatacgctgctcaaccagccggtggtaggtgagaaggagacgatcgccgagtttatccacaaggcggacaaggatgctacggttatcgcttacaagcgtttcgcgctcgaagcgtaatcggtgaccctataacgaaaaatagcgaaggaatttccttcgctattttttgcttttatggtgtcgatgttcttgaatttccaagaagggatttcctctgttccccccccctcgatggggtgaagtagtcgaattcgatatgaacggaggcttgtcaatgattgcggtcggtgccgaaaaaagagtatggaaatgccttttctgaagattagagaacaatttactgcaataatattgtgcgcgaaaaatgttctaatcgattcaggtccgatttattgtaataacgactcaatttcttcaaaaatattatatcttcttcagttaaataatttccttcccacatatatacatcggcaattttccacacttcagatggagtcatgattttcccatcttttaagataatacgaaaaaccaaagtatatctaccatctgaatctggaagaagaatgacataacgtcggaaaaaatctgtaaatgcggagttatcgccataatacaagatagaacttataaaaaagtcttcagcaagcataacagaatcaatcttaaacgactcttcttgtggtggctggtagtaatgagatatccctgccgacgttttaacaacaagatcgcatggaatccaccaattacaaaaatatacatggaaaagtaatgtgtcattttgagggttgaactgaaacccttccgattcgacatcttcaagcatcttttttaagagtcctattgtgggggaagaaatttccaatttcgcaccttttttccgcttccaatttggacgataattgtcaggacgatatatggtatctttgttgatctttttaagtccataagtataaatattgacgtgctccgacgcctcctgccataaatcaaataggcttgtttgagcatacgtggtcaagctaattcccaacaacaaacaagaaagaattatttttctcataatcagttattcaaatatttatatttaccgtaaaacctactttcgaattgacgattcaaaatagccgtacattcaattggaaccccatcggtacttactgcataatgagtacgcaaaggcaaacggtattgtgctctaatcctattttcgagattcggggcgggcagagcttgaagaaacagagagcataactcttgctcgaatccgatccgggagttattttctgcaaatccgccgcagaacccagagcggataacgtcgtacggggcgcagccagagccatacccgagccaatacccggtgaatgacactacaatccacaactccgtaaaccttggccgggggcatcgtttccgtggtaaggttgccgtcgccgagcagcgtgacctcttccggagtcgcccgaatgatgcggtgtacgacgaaattgccttgtacggtttcggccatcaccaccgctccgcgtcgcaggtccccgtggcgcaggggccgcagcgtgatgacgctgccgctgcggaagaagggcagcatactctgtccctggacgcagattcgtacgttttggccttcgagcagcaggtccctcgtctgggcgaaggcgatccggttcgctacggttttttccatgatcgatcgtattcaggcgccctgttttccttcgaggaccgtggcgtaggagagttcggccgctgccttatccggcaggcaggccaggtgccacacaggggcttgggtgagaatgtccgacagcgtacggcagattctgtcctgcaaatcgctgtcgtaggcgaatgccggggggcaggacgggagcagcgatccgacggcccgcaagattgacagtcgggtgatttcgttggccggggcctggctcaaccggacgattccggcaatcggccgcgaaatgttgcggtaacagggggtcttgccgctccagggcgatccgaaagcggtcgcctgcccctggtacatccggataatcgggctgtcgtcgttgagcagccgtgctccgggaatgtgctcctgccacagccgggtatgggtgctttttcccgtgccggattctcccagaaacaggacggcccggccttcgcattcgatggtcgaggagtgtatcgcaatggcttcgggggagatggcgatgccgaacatgatccaaagcccgaaacgcatcagggattgatggggttcgcgtccgtcagcgagcaggtcgctctgtacatccggcgaattgaacgctttgaagaatagcgtcggacgatccccgttgcggggaaccatgcggaacaggtaacctcgcggcgtacgctcgaagtggcagtcggcttccgcatcgtcgaacggaaatacgtcgagttccctgttcggctctcctcctgttaattctttatttatcgtgcagtccggaatcaggcgcatggtcagggatgcggccggatccgcttctgcggcgaacggttcgaatgcccgggccatgtggctgccgggtcttacgaagagccgatcgacctgttccagccggatgcggaatccggcgatgatatattctctatccattgttatcgagtgtgatgatgcggtcgcagtactccagcgagctttctcgatgggcgatgaccacgatggttaaatctctgttgtgttgtgacagttcggcgatcgaacggttgattccctcctccgtcccgctgtcgagcgccgaggtcgcctcgtcgaagaataaaatgttggcctgtttgtagagggctctggcaatgccgatgcgctggcgttgtccgcccgacagtttgttgccggcctccccgatcggggtgtcgatccctgcggagagcgattgcacgaagtcttccagccgggcggcacgcagggactcctcggctctccgacggtcgattttctcctcctcttcgcccagggcgatgttttccagcagggtgccgtccagcaggaacacgtgctgcgaaacgtagccgacggcattttgccagcggcggcggttggcggcggtcaggggctcgccgtcgatcgtgatttcaccgccggtgggggtatagaatcccaacagaaggttgaacagggtcgtttttccggcccccgatgcgcctcggataccgacgtgttctcccttgcggatcgtgagtgtcagcccgtgcagcacctctttgccgccgcgctcgtcgtcgaagcggaacgagaggtcgcgcacggcgatttcacgttcgaagggctgcggaggctgtgcggcggacggttccggcttttcgtcgttcaggtcgatgtcccgcaggatatcgatggtgtagcggttgtatttgagtgccgaccagccggacatcatgttgcgtaccgaaggcatcagccgcaacccggcgacggcgaatacgccgaagaggacccgggcttcatcgcccggcgtaccgaggctgaccgccacgaacagcgccatgccgatcgccagtcctacctccatgaagatcgaaggcaaggcattgacggtcatatttctggactgaatcgtaacgatcttgtccatcgcccggtcgaagcggcgcagcatcgaaggaaaggcatcgttgatctccaggtcggcatatccccggaaggtttcgacgaccgtgcgggccttctcgcgctgggcttcgttctcctgtacgccgtaacggtggagccgtttgcgcacggcgctgtagtagaaccagacggtcggaatgaataccagcaggaccagtcccgcgactgtggggttgtagaacagcagcgccgtgaacagcagtgcgagcagcatgctctcgctcgtgatcgacgcgagcggtacgaggatccccgtaacgaacgccagacagacgaaattgacgttccgcgagagcagtgccgaattggtgtttttgatgaatcccagcccccggtcgtgatattcgatatagagccgccgcgacatacaccggtagaggtcgtaaatataccgccgttcgtagcgcagcaggaagaggttcagcaggtttttgaatgcgatcagtgcgacgatacatccgcatacggtcagggcgaacgcccggtccgattcgaatccgcccgcttggtacagccgttcgagccaggggttcgtgtgcatgctctcgctgtcgaggatcagcagcagtaccggaatcagcagagccagtcctgcgaagttgagcagggcccgcaggaagatcgtgccggaaaccaggtagctccggcggcggaatcggcgggggatgatgtccagcaggattgatctcatgaagctgtttttcgggaccggtctgcgattgtcgttcgcaagagccggcctgcatttttttgtataagtcggggacgctcgctctttccgttgcgggatgcgtcccaaaaacgtatcaaatatacgattatctgttcgaaaaattcgccgtttgtccctgttttttccggtattcgcttctgttctccccgtttttcaatcctccttctcctccacccgctccgtgcgtcccagacgtacataccagagatagccttccgtccgggtgtaacccatctgccgcagcaggcgcaggtactcgcggatctgtttgcggtggcgtgcggtttcccggtcgccgaacttgtaatccaccactacggcccgctcgccgtcggtcatcacgcggtcggggcgccgcgtcgttccgctgcccggcaggatgatttcgttctcgttgcgcaccacctgccacctgccgccgaaccactccgccgtcaccggatccgcgagggccttttcgaccagctcccgcaggcggggggcctctttttcgtcgagtacgccgtcctgggtcatcgcttcgatggccgtgtagatctcatccgttgtcgcggcgttttcgaagacccggtgcatcaggatgccgaagtcgcgcggggtgagttcggcccgaccctcttcctcgtagtagcgttctgtcggcagccgcagttgcaactgcggctccgacgtggggtagtccccgagcaggacgtgcgcggctttcgctttccggtgcgtatccggctccggtccggcgaattcgccgaattcgtaggtttcggcggcttcgtcccgggagtagctgccctccagcccgtccagccggaccgtgccgtcctccggggcgatgttttgcaggatcaactgtccgacgttcggtcccttggctcccttctgcgggatgaagatgtgcagcgactccacggcccgtgtcagggctacgtacagcagattgatgttgtccacgtgcgcgtagatcatctcccggtaatagtcggccgagaagagcgattcgcccatgctggttttataccgcaccgggaatcggccgatttcctccagctcctcgtccgtgccttcggcccagacaatgttcgccgagagtccgctcgatttgggattgagcgtccagttgcagtaggggatcagcaccacctttttttccaaccctttggccttgtgtatcgtggtgatttcgatggtcgtttcgccctgttcgacgctcagcgagcggccgcttccctgttcgtcccaccatttgaggaagaggggaatgtcggctacgcggcccgcgcagaagttgatgatctgttcgtgcacggcttgcaggtaggcgatctcctcccgtcgctcctgaaggtcgtaccgcatgacgatccgttcgaacgcctcttcgggcgggaacagccgcagcgatttgagaaagacgacctcctcttccgtgagttccgcatcgaaggagggtttggctgaaaaatggttgtaaatggcccggctcagcgaatccgcaggattcatggccagcttcaggcaggcgatgacgaacgaactgatcggtgccgtgccgacgatgagcgcctcctgcgtcatcacgtcgaaccggtagcggggatccgtgttccggcgcttgaagtcgagcagtgccgaggcgactttggtgccgtccgtgccgctgcgcaccagaatcatcatatcttttgggcggaaccccttgttcacgagagctttgatgcgttcgatgaggggcggctcgccagcgtaatgggtgatattgacgtagccgggatgcagccctttcttgcgggcgctctgcgcgtgttcgcaataggcctcctgcagggtgtcgcgcagctcttcccgggcctttccccccagggcgtgcggcggagcctgggcgagcagttggttcagtgccgtgttgtcgctttcgaccaccttgccgatcatccggttgttgaactccaccaccagcggcaagctccggaaattctccttcaggtgtatcgtttcggtgctcgcttctcccagctcccgtgccgcccggcggtgcaggatctcccagtcgccgccccgccagcggtagatcgactgtttgatgtcgcccacgatcagcaccgaggtctgttccgactgtgccatggcgttgcccagcaggggcaggaagttttcccactcccgggtcgaggtgtcctgaaattcgtcgatcatgaaccggtcgtagcggttgccgactttttcgtagatgaacggggcgtcgttgtggcggatgaactccgagaggatgtttttggtctcggagagcatcatcacgttctcgtcgctgcacatctgccgtactttgccgtaaaggtcctgcagcagggcgaagctgcggtagttctcgcgcagcaggtcggtggtgttccagaagcggatgctgcggtcgtaacgggcgcacagttcggccagcagcggctgaagctccgcgaccagcggcagggccggcgagtccttggcgcaccagccttccgtcgtcgcgctcatcttgcgcacggtagctgtgggtgctttgatctctccggcggctgcggccgcgaagtagcccgcgaagctgcggctcttgccggtgaagtcggccgtcgtgacgccagcggtattcatgaggttcatggcccgaacgcccaattcctgaaactcctttttcccggccttggccctccccgtcgccttgccgacgatccggtccagttcggccttggaacgctccgccgagagggtttcgcggttgctctccttgaatatttcgttgcccagggcgaggatgccttcgcgtacatcccagcgtttgccgtcttcgatgcgctcctgcacgaaggccgtgagccaccgttgcagttcttcgtcgatgcggatctgttcgaccagcgcatccgcgctcttggagagtaccgaggcggtttcgatttctacgttgtagttcagatcgagtcccaactcctggatgaaagcccgcagaatgcgctggaaaaaggtatcgatggtgaggatcgtgaaccgcgaatagtcgtgcaagatgcgggtccgggcttcccgagctcgggtgcggacggtccgttcgtcgagcgacagctccgtgcacaggctggccaggtagccgcttttgccgcccgaggccagcgtatgtatctccgacaggatgcgggatttcatctcctcggtggccttgttggtgaacgtgacggccaggatgtgacggtacagcgtgggttgctcgaccacgtcccgcacgtatttgtatgccagctggtaggtcttgcccgacccggcgctggcgttcagtattctcgctctcacttggttatcgcttcaaaatgtcggatggaagcggccggtggaatcccgctttgcggcaggtttgctgctgcccgggcattttttccggccgcatcgatgccggtggcggatgaaggctgccggagccggatgcctgccggctaaaccgacgtttttttggtaaaggtagcgataaaatgggaaacggacggagaaattcaaaaaaatatcgtatcttggcgttacgaaaaagcaaaaaacagaaaaaactatgaaaagatggatattgagcctggcgctcctgacgctgggatttacggcttcggcccagaatgatctgatcgatcggggggagttggctcccgaaatcgcagcggcgagcggcgagaaaatggagtggcttccttccttcaatggtgtgatcgtcgaggggttgttccggatccggttcgagcgggtgcctatggatcaggctcccaagatcattttcaacaccaaaggcgtttacgacagccgcttcacggcggaggtgaacaagaataagatgctcgtgatttccgagcgcatcggcgcccgcgaacgttccgaaaccgaggtgacggtttattacaacaacctggaggagatccgtatttcgggggcgaatgccacgttcggggaaccgatcgactttccgcaggcccggtgctggttttccaacggggcggtcgtcagcgcggcgcttgatgtgaaggatcttcagatggatgtgacgggcaagagcgtcgtggtcctgacgggcaaggtccgttactgggatctgaatgtttccacggcccaggtggacgctgccgctgtcgaagtgatgtccgtgcgtgtcaattccacctccaaggccgacgtgaccatcaccgctccggagcgcctcgaggcgtcggtcggtacgaagggccggatcacctgcatcggagagcccgagttgctgcacacttcaaactccctgatcgggggcgagatcaccttcaaatagcgcacttgccatgccgggattcctgcaggaggtcgctgccgatttatacgacagatacggggacgatatttcgtccctttctgttctgttcccttcccgacgtgcacggcttttctttatcgacgccttgtccggcatcgccgaacgtcctttgtggcagccccgctggacgactatcgacgagttgatgagcgagatttcgggtctccgcatcggcgaccgggtgcgtctggtgaccgaactgtataaagtctattcggaatttcatcccgaatctttcgacaagttctatttctggggggagatgctcctcacggacttcgatacgatcgacaagtacctgatcgacgccgatatgcttttccgcaacctggccgacatcaaggagttggaggccgacgtttcgtatttgagccccgtccagttgaaaatcatcgctttctgggccaatttcacggacgaaacctccctttccgaggagaaacgccgcttcctggccgtttggcagacgctgggcccggtctatcggactttccgcgagcggctccggtcgctggggatggcctatacggggatggtacaccgggcggccgccgagcggatcaaggccggcggtttcgcattcccggagtcccggcggttcgtcgtggcgggcttcaacgcgctctcggagtgcgagaaacggcttttcaagtttctctccacggctgccgaaaccgatttctactgggattacgatacttattatacggacaatgccgaccaggaggccggtatgttcctgcgcgagaaccggatcctgtttcccgcccggcgcgaacttccgcacgatcatttccggtcgccgaagcgaatcgaagcgatttccacggtatcgaacgccgtgcaatgcaagtacgtggcttcgatcctgcgggaactggctgccgaacaggggccgctggggaaggagactgccgtcgtgctcacggatgaaaacctgctgctgcccttgctgcatgctctgcctgcggagattggaaaggtgaatgtgacgatgggttatccactgaaacagagcctttcctattcgtttgttgaacgattgatcgaactgcaaaaccatgcctggcagaaggagggcaaaccgcttttttaccacgccgacgtgctgggacttctgtcgcacccttatatcctcgaaagcgacccctcccggatcgtccgtatgcaggaggagatcgtccgaaaccggcgtatcacggtcgcagcggagtggctggcctgcacgccgttgcttgctacgctgttccggagcgtcgaggggtggcgcggattttcggactacctgctggcggtgatcgcgcagattgcccggatgccttacgaagatacggaggcacgccgccgcgtagagttcctgaacgtcatttccgaagaggtgataaaacttcgcaattcactgaataattgtgaaatagaattatctatatcgatctatacttcacttcttcgccgacatctgcaaaccctgcgtattccttacgagggagagcctttggagggaattcaggttatgggtatcctcgaaacccgcaacctcgatttccgcaacgtcattttgctctcgatgaacgacgacaactttccaggcagtgtcgtgaccggtacttcgttcattccctacaacctgcgggcggcttatgccttgcctacgccggagcatcacgagggggtttacgcctactatttttatcgtttgctgcaacgggccgagaacgtgcggatgctctattgcgctcatgccgacgacaagaccaccggcgaacagagccgttacatctatcaactggagtacgaaactcccttcgagatcctccgccgggaggtcggtatcgatgtcaatcggatggaaaccccgccgatcgaggtccccaagcaaggggaaaccgccgaaaagttggctcgcttcctcgcgccggacgatcccgtgcggctgtcgcctacggcttttttccggtatgtggcttgtcccctgcgcttctattttcactccgtggcccggttggagccggacaacgagatttcggaggaggtcgatgcaccgatgttcggtacgattctccatgcggctttgcagcggctctatgctccctttgtcgggaagaccggctgcggagaggcgttgcgtgcgctgactcgttcgtccgaagtggagaaggcggtagttgcggccatcaatgaaaactatttgcaggatgttgaagcgacggttgaggattatagcggtaatctgttgttggtcaaagatattgtaatccgctatattcggggcggcgtattgccttacgacgccgcgcatgacgattttacggtcgaaggactcgaggagcggatcgggcaggagtttgcgttcgaaagcgccggaaaatccctgcgtgtggtcttcgggggcctggccgaccggatcgaccgcctgccggacggtacgctgcgggtcgtggactataagaccggcgaaccgcacctcgatttccagggggtcgaagcgctctttcgtggagaggccaaacagcgtcaatccaatattttacagacgttgctctattcgatgatgcttttccattcgcggggggtggatgccgagccgacgctctattacgtgcgggccatgcaccgggacgactattcgtcccggctcgtcgatcgggagttggggcgcacgggcgtacgctattccgaataccgcgagcctttcgaacggctgttgcgcgaaaccctcgccgagatgttcgatccggcgattccgttccgtcaatgcgaggatgccgagcatacctgccgctattgcgatttccgcgagatctgcaaacgctgacgcgggcatgtcgcagcgattttctccgtgtcgtcttttcggaaaggcgattacattttcaatctgccccttgtccgacgatcgcttttcgcggctggtgcccgcgttcataattctgtccctgaatcctcttttcggagggagtctgggccactgtgctcccgaagaggtgtatatgaaagtgtataatcacgttcggaaaatcagtttgcagcctgtaaataccggccatagagcgcctcatatcttgatctgattcattgacggacggtgcgagcgtatttccgacgatatgcgggatcggctcggagaaccgcttttgcgggagggtcggtcagttcacaacggatttttcgcgggatgcctgtaaatactcccgcaggattttttcgagttccgtcgtgccgatatcgactgttgaagccgtgattgcgtagggggatccaaagtatttcatttgccagcgcataagctctttggcaatccggtttttctcctcgtcgatcgcccggtcgggatcgtggagttcgatccggatgaatttctgcccgtaggttcggaatacgctgaaatccgcaatgcgctgccattcgatcgtgaggtagatcccttttgcaggtgcataaatccgcagactgtccggagtcagcaacagggtcggcttgcttcgaaaaaaatttttcagcagcatgataaataagatgcagaagcctcccccgaagaagatcaatcctgcgatgccgatgaccagcccgaacgtcccgtgcggctgtacgatgacgagcaggcaggagagtgccgccatgatcgctgcggcgagcgtcgtgcccagcaatttgcggtggctgggatagatagccgtttcttttttcattcgcgattcgaaaaattagtcgaaggactgcatgcccgactgggcgatgcggatgatccgctggtactcgacgggcgacagttccatgaagaaatagtggatcggatcgacgcgcatgccgttgtgccgcacttcgtaatgcaggtggggtgcgatcgaaaggcccgtgttgcccgaaagtccgatgatgtcgccgcgacggacctcctgcccgcggcgtacattgaccgccagcaggtgactgtacgaagtttcgtaaccgttgccgtggtcgatgacgatggtacggcccgctgtggagcgcgaggcgatctccttcacgcggccgtccgccgtggcgaagacgcgcgaaccttcgggcaccgtataatcgacgccctgatgggattgcagggtgcggtagaagggatggatgcgcatgccgtaggaggcggtaagcagcgtgagctgctggttgataacgggctgtatggccggaatccggttgcggccgtcgccgaccgtatccagcagacgttgcagttcgaggtacgattcgttgagcttggtcagcgtcgcttcggattgtctgaccttctctttgagttccaggatgatctgacggtcggatttgtccagcaggctttcgtacgttgcgagccgcttggtttcatattcggtgtcgaaatcgtaaggatcggattcgaaaaggatgttgaagacgttgcggtcgcgttcggaaacattttccatcaccgtgcgcagcgagtcgtagcgggcttcgagccgggtgtattcgctcctcaactgatcggtggagtgcttgagctcgtattcgacgggcgtgtcgaagaagagcgagaacccgacgtagtagaggatggctgcgccgaaccacaccagtacgtgaaacgtgatgcggatcgccttctgtttgggcgtgcgcggtgtggcgtatttgatcggtctgcgggttcttgccatgttattcgtcgaaggtatcgaggttgagctcctgcatctgttccatcaggcgctcgtactcctcgttggtcatattgcggttgaaatagttgatcggattgacgacctgtcccatgtggatcacctcgtaatgcagatgggggccggtcacgccgcccgtgttgccgaccttgccgatcagttgtccgcgcacgaccttctcgccgggtttgacgaagatctggctcaggtgggcgtagcgggtctggtagccgtactggtggttcaggaggatctgcttgccgtagcctctgcggggctgtcccaggtcggtggactgtaccgtcgcgtcgcccgtggcatagacgttgttgccgatgttggccgccaggtcgatgcctttgtgcaggatgcgtcggtggtagatcgggtggttgcggtagccgaacggctcgatgccgtggcgcagggcctgacggtcgatgggccagatggccgggatcgccgtggacatgttctccttgttcttggccaggatttgcaactcgtcgaacgaaacggaggtacggtagagctggcggccgaaagcgtcgagctgctgccacgtgccgatcatcagcggggcgtattcgtcgcccgccagagccgcgtatttggacgccggatagggggtgtagatgcctccgatattcagggtgtcggccgagaacaaagcccggtaaacgaagttgtcgcggtggtgtatttcgttcagtttgcgctgctccgcgcggatcttgtcctgaaggagccggtatttgaagaccagctccgaattttcgcgcaggatgcggtacattttcggcgtgtagaagacattcgcgaagacgacgttgacgatcgatactgcgatgaagatgatgaggattttgcgaatgacacggtaggtgcgcaggcggaacgggaccgtgaccacctcatgagtggccgaaaccacctcacgggtcagggcgtggggatcgaacgtctgcttttttcgtgccatgatctgaaaaactccttggaagtgatgcaaaattaaggtaaaatatgtaattttgcaatcttgtaacttctttaagtttcgcggattcgagcggatgacagcctgagcacaggcagccggaatctgcggagtgtgtcttatgaacaacgcaaagaattgaaaacacagtatatggaatccaacaaaattcgtcaggctttcctcgatttcttcgcagggaaggaccatgtgatcgtaccgtcggcaccgatggtggtgaaaaacgacccgacgttgatgttcaccaacgcgggtatgaaccagttcaaggacattttcctcgggaatattccccgtccctatccccgggccgccgatacgcagaagtgcctgcgcgtgtcgggcaagcacaacgacctggaggaggtcggccatgacacctaccatcacacgatgttcgagatgctgggcaactggtcgttcggcgactatttcaagaaggaggcgatcggctgggcctgggagctgctgaccggggtgtacggactggacaagagccgcatgtacgctaccgtgttcgagggaagtcccgaagacggggtgccgttcgaccaggaggcctacgacatctggctgcaatacctgcctgcggatcacatcatccgcggcaacaagcacgacaacttctgggagatgggcgacgtaggcccttgcggaccttgcagcgagatccactacgacctgcgcgacgagtcggagattgccgccgtgccgggccgcgagatggtcaatcagggcagcccgctggtgatcgagatctggaacctggtcttcatgcagttcaaccgcaaggcgaacggttcgctcgaacccctggcggccaactgtatcgatacgggcatgggtttcgaacgcctctgcatgattctgcaagggaaaaagtcgaattacgataccgacgtgttccaacctacgatccagcgcatcgccgccatgtctggcaaaacgtacggtgcggatgagaagtgcgacgtggctatgcgcgtggtcgccgaccacctgcgtgccatttcgttctcgatcgccgacggacagcttccttcgaacgtgaaggcgggctacgtgatccgccgcattctgcgccgcgccgtccgctacggctatacctacctgggcttcaacgagcccttcatctgccgtctggtggccggtctggtcgatcagatgggcgggcagttccccgagctcaaggcccagcagacgctgatcgagaaggtgatcgaggaggaggaaagctccttcctgcgtacgctcgctacgggcatcaacctgttggacggcgtgatggccgaggttcgcaagagcggcggcgaacgcatttccggcaaggacgctttcctgttgtacgatacctacggattcccgatcgacctgacggagctgatcgcccgcgaacaggggatcgaggtggatctggaggccttcgagaaggagctgcaggcgcagaaggagcgttcgcgcaacgctgctgcggtcgataccgacgactggaaggagctgatccatatcaagcagagcgagttcatcggttacgacacgctgagcgccgaggtgaagatcgcccgctaccgccgtgtgtcctccaaaggacgcgtttcctaccagttggtgttcgaccgcactccgttctacggcaattccggcggtcagatcggcgatatcggctatatcgaaaccgccaacgaacggatcccggtcgtggctaccgagaaggagaacggcctgattatccatatcgttacccaactgcccgaaaatcccgaggcgaccttcatggccgtcgtggatccggagaaacgtcaggcggctgccaacaaccatacggcgacccatctgatgcatgaagcgctgcgcaaggtgctcggtacgcacgtcgagcagaaaggttcgctcgtgacgcccgaatacctgcgcttcgacttttcgcacttccagaaggtgacgcacgaggagctgcgccgggtcgagcaactggtcaatcgtgccattcgcgcgaactatcccctcgaggagaaacgcgatgccaccaaggaagaggctgcagcggccggggcgatgatgctcttcggcgagaaatacggcgaccgggtgcgtatggtgcgcttcggcacctcggtcgagttgtgcggcggtactcacgtgagcgctacgggtaatatcgggttcttcaagatcctgaacgaaagcgccatttccgccggtgtacgacgtatcgaggccacgacgggggcgaaggccgaggaggtgatctatgcggccgaagatacgatgcgcaacgtggccgattatctcaataacccgcagattcttcagtcgatcaagaagatcatggaaagcaacgaggctttgaagcacgagatggaggccatccgccgcgaacaggtggccgagtgggccgcgaagatcgtcgattctacgcccgagcgtggcgggatgcggctgatggctacgcagaccgatcgccggccggatttcatcaaggacctcgctttcgccgtgcgttcgcgttcgaagaatatcgtactggtgatcggatcgatcaatgacggcaagccgacgctcaccgtcgctttgggcgacgatatcgtggcgcagggagtcaatgccggtgtcgtggtgcgcgaggcggccaaagccatcaacggcggcggcggcggacagcctttcctggcgacggcgggcggtaagaaccccgatggcatccaggcggctatcgacaaggccgtagaactgattgtggaacaagtaaagtaatgtttcggatgagtaatcgcaaagtattgctgatgatcctcgacggttggggcatcggcgacggacagaagggggatgtcatcgcacaggtgcatcctgcctatatttcggaaatgacccgtaaataccctcatgcgcagttgcgtacggacggcgaaaacgtcggcctgcccgatgggcagatgggcaattcggaggtggggcacctcaatatcggtgcgggcagggtagtctatcaggatctggtgaagatcaaccgggcctgccgcgacgattcgattctgaagaatcccgaaatcgtgaaggcgttcgaatacgccaaatcgaacggggtgagcgtgcacctgatgggactggtttcggacggcggagtgcactcgtcgctggatcatctgctcaaattgacggacatcgccgataaatacggcatcgaacgtacctacgtgcattgctttatggacggccgcgataccgatccgtacagcggcaagggattcatcgaacggctggaaaagcacatgcgggaacgatcgacgggcgtcgtggcctcgatcgtaggccgttattacgcgatggaccgcgacaagcgttgggagcgtgtgaaggtggcctacgacctgttggtcgagggcaagggcgaacattcgtccgatatggcgctggcgatgcagaagtcgtacgacgaaggggtgaccgacgagttcgtgaagcccgtcgtgcggatcgacgaggacggcaatccgatcggtatgatccggccgaacgacgtggtgatcttcttcaactaccggaacgaccgggccaaggagctgaccatcgtactcacacaggaggatatgccgcagcagggcatgcacacgctgccgctctactattgctgtatgacgccctatgacgccaagttcgaggggctgcatatcctgttcgacaaggagaacgtggccgacacgatcggcgagtatgtcgcccggcaggggctttcgcagctccgtatcgccgaaacggagaaatacgctcatgtgaccttcttcctgaacggaggccgcgaggaggagttcgagggcgaggaccgcattctggtcgcttctccgaaggtggcgacttacgaccttcagcccgagatgagcgcttacgaggtggccgacaagctggtcggggcactcgacaggcagaaatacgatttcatctgcctgaatttcgccaacggcgatatggtggggcatacgggagtttatgaggcgatcgagaaagcggtgaaggctgtcgatgcgtgtgtggccaaagtcgtcgaggcggcccgtcgcaatgggtacgaggtcgtgcagatcgccgatcacggcaacgccgataatgcggtcaatgccgacggcacgcccaatacggctcattcgctcaatccggtgccgatcgtcgtggtttccgaccgcgtgaaaacggtccgcgacggtatcttggccgacgtagcccctacggtcctcgacctgatggggctcgaaaagcccgaagccatgacaggacattcgctggtgaaatttaagtaggggaactcttatagatgatatagagcggattctatattgattttgatttgcactgaaaaacatctgtttttcagtgcaaatcttttttagaggattcgggaggatttattcccgaatattttgtatttttcataaatgatgttatattcgtgaagggtatttttttgaattttaatttaatgcctatgaaaaagtttatctgttgcgttgcggcgctttcggcattgatcttttcgagcggttgtggcgacgacgagaagcaggtcgaaccggtcgatgaatattggatcgaatggaaaaatgagagcgattatcgaatcgatttcttttatgtagaaggagggtatcggtggcatgacgggattaatcgtggaaagtatgtttccgtgcgggtgtccggctcaccggaaggtttgtcggactatattgaggaccgaaagatggggctgtggtatgagcagtttgtcgtcgatggcgaaacgtatgcatatatggaaaactacgacccgtcggggtcgggtaattccgctgtgccaaagggtttgcaggacgtgcagcgctatactttggtaaataaggagaaaaacggtagtctggctttggtttgggtttatactttcaccaatgccgattacgaggcggcgaaagcccggggtgcggtgcatattacgcttggggaaatttaatttttaggaatatcaggcatttgattcttcccggaagtcggattcgatttccgggaattttcttaaaagattcaagaaacgaagttgtattttcgaatattatctattacttttataatgaagtcaaatcagcctgaatttaaattatgagaaagattctttatttgtggatgatttgcgtcgtgctgtgctctcttgtaagttgcaatgacagcgacgataaaacctattcgtcctatgtcagccggttcgtgtgggagaataggtgcaatcataggatcgaatatttctatgtagaggggtgcatcacgagatcccagggaataaagtatggagagcgggctgtaaaagaattggaaggaccttcgcccgtggatttgcagacttttctcgacggaagagaaactcatgttatctacgattcttttacagaaggagttataatttactgttatatggaaaattattatccgtcgggactcggagaagttgcggttccgaaaagtttgcaggatcccgatcgttatgtttacaaggcttatgaagagggggataaatacgtcgtggaatggacttatacatttaccgatgcggattacgaggctgccagggctcgcggaccggtgcgcatcggaattgtttgattcataacagaaaaatcgaagaaaaccccggactgaacttaagttcagtccggggttttctcattcggtcgcttcggcggcgtcttactatcgctgttcggccaaaaaggtttcgatattccgttcgatgcagccgaccaatgtttcgagtgcttcgaccggggcccaggccgtgtggggcgagagcagcaaccggtcggggtctgttacacgcagcagggggttgtccggcgacatcggctcgcgcgagaagacatcgattccggcaccggccagccgcttgttgtcgagcgcatcggcgagggcctgctcatcgacgatgccacctcgggctacgttgatcaatagggccgaaggtttcatcagggccaattcccgggctccgacgaggccgcgcgtgcggtcgttcaagggagcgtggatcgacacgatgtccgaccagcggagcagttcgtcgagcggcatggcggggtagggttcctgccgttcgacacccgaagtcgaagtataggcgatctggcagccgagggctgcggcgacttcggcgaccttgtgcccgatggctcccaggccgatgataccccagcgtttgccgtagagctggtggagcggccgtccgaaatggaacggagcgtcggatgcggcgtattcgccgctcttgacgtagcggtcgtagtagatgctctgccgcagcagggcgatggcggcaccgatcgtcgtttccgtcaccgcatgggtggagtagccgacagcgttgcggacctcaatcccgcgttcggcggcggcttccagatcgacgttgttcataccggtagcggcgatgcagatcagtttgagctgcggcagcaccttgatagcttcggcccgcagggggaccttgttggtgatgacgatgtctgcgtcgatacaacgctcggctatttcaccgggcgtcgttttttcgtagccggtataatttcccagttgcttgatgcgggagaggtcgattcctcccaggctgtactcatctaaaaatacgatattcatagttgcggttttatttcgggtcttgtttcggtatgtgcatccgccgaagcaggggcctcgccgaataagaccatcattttttgtaccattgtctgcggatccgtggtggtaccgggtacgggaaacggaggtgtttccgcagtttccggtacggatcgggattgccggggcctcgacggaacagtcgtaggttccgcgtcgcagccggcgggcttgtctccggaccggacacgggcgatctcgtttgcggactgtatcgtccatctgtcgtgaccggcggattacggagctgcctcggctatgcttgttcgcatcgttcgccgctgttttgcaaagatacgaataagccgagcgcaaaagcaatttttatttgcattttgccgaggcggagtatctaagacgaagtcaaagatacgaaaagatggacactaagccaaacttggttgagtttgtccgattcatatcttaaaaacaaagatactaaaagccgagagaaaacgggaattgttcccgttttccgaggcgcagcctatttaaccgaggctatgtcaaagataataatatttcgaaaaacggatctaaccgcttctggatggtcataaatccgttccgacagccgtttgagcggttttcttgtacgcgggacggctgttgcggtccgcttacagctctccgatcactccccggacgactaccgaggcgcagcctatgccgaagagggcgggcaggtaggagatcgtgcccgtgttggatttcttgttctgttcttcgcagaggatcgtcgcgccttcgcgtaccggttcggcggagaatacggctttgaagccgctgcgtactccggctttgtgaagccgtttgcgcagcatgtgggccagcgggcagtggtgggtgcgggagatgtcctcgatttcgagccgcgtggggtcggttttggctccggcgcccatcgagctgaccaggggaatgccgcgtttcagcgcccccaggatcagcgccagcttgggcgagagggtgtcgatcgcatcgaccgcgtagtcgaaccgtgccgagtcgagcaacaggtcggtttcttcgtccttgatgtatttatcgactacgtggagttcgagtgtcgggttgatgtcccgcagccgctcggccagcacctcggctttgggccgtccgacggtcgagtggagggccaccagctggcggttgatattggtcggattgaccgtgtcggcatcggcgacggtcatgcgccccacgcctgcccggacgatcatctcggcggcataggcgcccacgccgcccaatcctacgaccagcacgtgggccgcacgcagtttttcgagtttttccgctcccagcaggagctccgttctttcgagccagttgtcagtcatcgttcgaatatctctctgtaattgcggtatatcgcgcatttcaacagttcagggtcgaggtctttcgcttgggcgatccggcggtaaatctcctcgatcggcacgtcgctttcgtccgtttcggcgaagaggttttcgaccggcgtgcgccgcagggcttcgaccgtgcggggtgagcggaacgtccgctccccgaaggagaggtagtaacccttctttatggcttcggccgcctgctgggacgatccgatgaagccgtggaagatcaccgcccgcagtgcatggggagccagttcgcgcatgaccgcttcgaaggccttcacgcagtgcagcacgaccggtttgccgagccgttcggcccagtcgagctgttcgcggaaaatccggagctgggcctcccggccgaccgtgccggcatagtccaggccgatctcgccgaccagatcgacttcgccgaaccgggggacgatctcttcgattcgccgtgtttccgcctgccagggatgaatccctgcgaaagagggctccaaagccttgccggtgggacggtgcgtgtggatatcgactatgctgcatttcataatgcggatcgctctaaaaagacaaagttatgatttttcagtcgattaaaaaaaatcaggctgctctttgctgttcgtatcggaaaaaatcgtatcttcgcacgcgatttggtgtgttattacgctaacaaacattgcctggaaatctcaatgcaaaataattatctgtaaaacaaccatttattaatcatgtcgaaaatcattacattacgcaaaggtctcgacatcaatcttcagggtaaggccgtggagaagctggtcaaattgccgctcgctcccgagtacgccgtgtcgcctctcgatttcgagggtgtgacgcccaagttgctggtgaaagccggcgaccgggtcaaggcgggtaccccgttgttcttcaacaagtacaacgaaagggtggttttcacctcgcccgtcagcggtacggtttcggcgatcaatcgcggtgagaagcgttgcattctcaacgtgacggttcaggccgatgcgacccagacgtacgaagagtttgccaagctgaacgtgcaaaccgcttcccgcgaagagattatcgatcttttgctcaagtccgggctttggcccatgattatccagcggccttacggtatcatcgccgatccgagcgacacaccgaaggccgttttcgtttcgacgttcgattccgcaccgctggctccggattacaatttcgtgctggccggtgagaagcggaacctcgaaacgggtatcgaagcgatgcgcaagctcacttcgggcaaggtccatctgggcgtgcgtgccggtgcggagggcgaaatggcatctttgaaaggggccgaaatccacacgtttgcaggcaagcatccggtaggtaatgtaggcgttcagattcatcacgtcgatccgatcaacaaggacgagcgggtgtggacggtgaatattcaggatctggccatcatcggccgcctgctgaacgaagggcgcgtcgatagaaccaaagtcatcgcggtcgcaggctccgaggtgaaaaatccccagtactatcggcttatcgatggtgctccggtggcttcggtgctcaaggacaacctgaagcccacggcccacaatccccgcatcatttcgggcaacgtgcttacgggacgcaagaccccggccgacggtttcatcggtttttatgcaaacatggtgacggtaattcccgaaggcaaccactatgaattgctgggttgggcgatgccccgtctgaacaagttttcggtttccagggcctatttttcatggctctgcccgaagaaggtttacgacctggataccaatctcaacggcggcgagcgcccgttcgtggtgacgggactgtacgacaagtacctgccgatggacatctatcccacctacctgctcaaggcgattcttgcgggcgacatcgacaagatggagaacctcggcatctacgaggtcgtcgaggaagatttcgcgctctgcgaatttgtcgatccctcgaagatcgagatgcagcagatcatccgggacggtattaacttaatgatcaaggaggcataacgatgggaggtttaagaaaattcgtagataaaatcaagccgaccttctccgaaggcggcaagctttcgttcctcgcatcgactttcgatgcgttcgaaacgttccttttcgtgccgaatacgaccacgagcagaggagcccatatccgcgattgcaacgatatgaagcgtacgatgatcgtggtggtcgtggcgctgatgccggccttgttgttcggtatgtataatacgggctaccaggtgggcatgaccggctgggcagccttttggttcggtttcctcaaggtgctgccgatgatcgtggtttcctatgtggtcggtctgggcatcgagttctttttcgcccaaaagcgcggacacgaagtcaatgaaggtttcctcgtgtcgggtctgctgatcccgatgattatgccggtcggtacgccgctctggatgatcgcgctgggtacggctttcgccgtcatcttcggcaaggaggtcttcggcggtacgggtatgaatgtcttcaatcccgcgctggtggcgcgtgcattcgtgtttttcgcctacacgccctttatttcgggtgagaaggtctggttcgccgacgacgctgtttcgggtgctacggccctcgaacaactcgctacgagtggtacgatgagttattcgacggcggacgctttcctgggattcattcccggctgcgtgggcgaaacctcgacgctggcgattctgatcggcgcagcgattctgctctttacgggcgtcgcttcgtggcgcacgatgtcgttcgtctttatcggcggcctggcaatgggatactttttccaggcactcggcgtgacgacctaccccgcttgggagcatctgatcgtcggcggtttcgctttcggcgccgtgttcatggccaccgatcccgtcacgtcggcccagacccgtacgggccaatatatcgtcgggttcctcaccggtgcgctcgccgtgttgatccgtgtggtcaatccggcctatcccgaaggtatgatgcttgcgatcctcttcatgaacgcattggctccgctggtggactactgcgtggtcgagtccagcatctcgcgccggaagaaacgtgttaaattggtaaaataggggagatatggcaaagaaaaaattcgtatgcagcatttgcggacatgtccacgaaggtaactccgcacccgatacctgccccgtctgccaggcttcctcgtcggcatttacggaggatcggtccggccggaaaaagggctggatgcacaatcccaacagcaacacttatatcatcgtctattctacggtcatggtcgttatcgtggcgactctgctggccgtggcttcgctctcgttgcaaaagcgtcaggcggagaacgagttgcaggagaagaagagcaatattctccagtcgctcgggtacagccccgacgaaaatccgcaggagttcgaccgggcgctggccgatttcgacaaccaggtcaaatccttcgtcctcgatgccgacggcgtgaaaaccgaaactccctccaaggaggtcttcgcgatgctcgccaccaaccagaatatccgcgataattacgatgccaagcgtcttattctgtttcagaccgaagacggtcgcgtcgtcattccgctgatcggtatgggtctttggggcgatatctgggggtatgtggcgctcgaaaaggatatggataccgtgtcgggtatcgtcatggcccacaagggcgaaaccccgggcctcggtgccgagatcgccacgcctaagtttcaggcgcatttcgccggcaagaagctgttcaagaacggagagttcgtatcggtcagcctgcgcaagggcggtgcgaaagatcccgagcacgaggtagatggtatttcgggcggtacgaaaacctcggacggcgtgacggccatgctccgcgattgcctgtcggcttacctgccttacttcgaaagtcagcatcaggccgcagcacagtcggtacccgttgccgcgaacgaggctgcaagttcggaagtgtctaaccagcaaaacgtaaacgagagccatgagtaatgaaaaggagtcgatcttctcggctaagaatttgaaatacctgaccagtccgttctctgcgaacaatcccgtcatcgtgcagatcctgggtatctgctcggccctggcggtaaccgtgcagatgaagccggcgatcgtaatggccctctcggtggccgtcgtgaccggtttttcgagtatggtgatgtcctgcctgcgcaagggcgtgccttcgcgtatccgtattatcgttcagctggtcgtgatcgccgcgctggtgattctcgtggaccagatactgaaggcatacgtctatgaagtgtccaaacagctctccgtatatgtcggtctgattatcaccaactgtatcgtgatgggtcgtgtggaggcattcgctttgggcaacaagccctggcccgcattcctcgacggtatcggcaacggtctgggctacggtatgattttggtgatcgtggccttcttccgcgaactgttcggttcgggaacgctgctcggctaccagatcgttcccgaaagctggtacatcgccaacggcggcggctattccaacaacggtctgatgctcttcccgccgatggcgctgatcatcgtggggtgcatcatctgggtacatcgttctcacaataaggatttacaggaaaaataggagggtaacgtatggaatcattgaatatctttattcggtcgatctttatcgacaacatggtcttcgccttcttcttcggcatgtgttcctacatcgccgtatcgaagagcgtcaagacggccctcggcctgggtctggccgttacgttcgtgatggtgatgaccgtgcctctgaactaccttttgtacgaatacgtcctcaaagccgatgtattggtcccgggtgtcgatttgagctttttgactttcatcgtctttatcgccacgatcgccgctttcgtgcagctcgtggagatggccgtcgagaaattctcgccgacgctttataatcagttgggtatcttcctgccgctgatcgccgtgaactgtgccatcatgggcggttcgctcttcatgcagcaaaaggtcgatgccctggaaatcacctcgctctggcagtcgatcgtctatggtctgggctccggtctgggctggtggctggcgattgtgatgatggccgccattcgtgagaagacgacctactcgcagattcccgctgcactccggggacccggtatcgcattcatcatcacgggtttgatgggtatcgcgttcatgatcttctcgggtatcaagttgtaatcctttaaaagagataaaaagatgacgttaacaattatcatagcgatcgttgcctttctggtgataaccctgattctcgtggggttgcttctctttgcgaaggcgaaactgaccacctcgggcgatgtcaccatcgacatcaacggcggggagaaagtgctcatcgccgagagcggcggcacgctgctttcgacgctggccaacaacaacgtgttcctgccgtcggcatgtggcggcggcggttcgtgcggcatgtgcaaatgtcaggtgctggagggcggcggcgaattgctgccgaccgaaacgggctttatcaaccgtaagatggccaaggagcattggcgcttgggctgtcaggtgaaagtcaaggaaaatctcaagatccacgtgccggagtcggtgctgggcgtcaagaagtgggagtgcgaggtgatctcgaaccgcaatatctcgaccttcctcaaggagttcgtggtgaaattgcccgaaggcgagaacctcaagttccgcagcggcggctatatccagatcgacattccgaagtacgatgccatcaaattctccgacatggacatcgaagagccttaccgcgaggattgggacaagatgaagatgtgggatctggtgaccaagaatcccgaacctacgttccgggcctattcgatggccaaccatccggccgagggcaatattatcatgctcaacatccgtatcgccacgcctccgttcgaccgggctacgggtaccttcgccaaggtgaatcccggtatctgctcgtcgtacatcttctcccgcaagccgggcgacaaggtgacgatttcgggtccttacggcgagttcttcctgcctgacaacctgcccgcgacgcaggagctggtattcatcggcggcggtgcaggtatggcaccgatgcgcagccacatcatgcacctgttcaagaccgagaagacttcgcgtcccgtatcgttctggtacggcgcccgcgcgctcaaggaggtgccgtatatggatgagttcctcgaaatccagcgggagttcccgaatttcaagttccatctggcgctcgaccgtccggatccccaggcggatgccgccggagtgaaatatacgcccggattcgtgcacaacgtgctgtatgagaattacctgaagaaccatcaggctcccgaggacaatatttacctcatgtgcggtcctccgatgatgatttcgtcggtggtgaagatgctcgacagcctgggcgtgccctccgagaatattctttacgataatttcggcagctgatagaggtctatattctgatgtaaaaagaggttacggtgtaaaccgtaacctcttttttgtcggtagaagctgcttgacaagggtatggatcggaaaattcccggccaattcagggattcttgtcctgcaggttgtaaagagtcctgttaatttcccgaaggcttctctgcggtcattcggaaatcgacgggaatgacgagactgacctttacggcgtcacctttttcgtcgcggcccggtgtccatttcggcgaggattccagtatccgggtcacttcatcgctgaagcatttatccggggactgcaaaatctttatgtcgccgacgctgccggcttgatcgacagtgaattgtgctacgactttcccgccgagattatttttgaaagcctccgccggataacggatctgactgtttacccagttgtggaaagccttcatatctccgctctggaatgagggcatctgctctgtctgttcgagtgcgagcgtggcattgcagacggcgatctgggagtaagcggtttcatcccgtatttggactttcgaagctttccctgtcggcggcctttccgggaagataggcggcgtatttctcgcgcatttcgggcgtgagattctctgttcctacgatgctataggtaccactgggaagtgtaagagagcgcaggccggtgacgggatccgtcttgaaatcggtgacttccccatcgactacgagcagtaggtcgtagtcttcgttttccggggaggcggttttttcggcggtttccgctggcgggtcggtcggggtgtaagctgacggcaatttgtcctggatgcggatttctgccgctttggaggtgaatccgaaagctgccagcaggccggtgacgatggggagcattgcgatcaggcggagcagagcgtatctgctcttcataggcgttgtcatcatttggattcgtttttttgttaatgaattggttaatgaattggacagaccgtcggctacgtccggactgtaaccgaactgctgcgtgaagatggttttcagataatttcctgtgtcgtgcccctcggcgagtacgtcgcggtcggcttcgaactcttccacttcggtaagtgcgcgtgctgcgagccacgcgaaaggattccaccacagcagggctttcaggctctccataacgatccgttcgagcgaatggcggtggatgacgtgactcttttcgtgggcgaagatcgccgcaatgtctttttctgcgacggagcggctgatataaatcgtgcggaagaaggagaacgatgcgatttgagcagtagggcgtaccaatacgatacgtccgattcgttcctgtgtactgtgtcgtcgcaggcgtcggatcagaagcgcttgccggaacatggaagagagtagaagaagtactccgcaaccgtacacgatccatatcgctgcctcgtaatcgaacgcggcggcggaaacggagggggcggtgaaggtggttttggcgggagtgcctgcggtggcgtaaatcaccttgcccggccagaccggaattcggagcaagggaatgagagccgccgcgaggagcgaccccgtgaggcagagccgtgctgcgaggtaccccgtgcaattgcgcagaaacagcaggtatgcgccgtacagtatgccgctgcaaacgactgtttcgaggatgtatcggacgatctctttcatgacttgtcggttttatgtcgggcttgccggatgatggcgaggatttgttcggtttcttgtatcgaaaggtcttctcgccgggagaagaaagaaaccatttgggccaacgacccgtcgaagtaggagttcaatatcgaagaaacaaccgtcttggcgtactcttctttgggaacgagcgggtagtattcgtaacttttgccccgttccgtacgtccgacgtagcctttgttctcgagtattttgacgaaagtggcgatggtcgtatatttcggtttgggctcctgcattgcggcgatgagatcattgatggaacctgcgcccagttgccagaggatctgcatgacctcttcttcgccgcgtgtcagttttttgagggtggtattgtctgttttcattgtgtttttattggtttactacaaatttagtactaaaattttagatgtgcaaataaatctactaaaaaattagatgaaaaggttgttttgttcggaagcgatattttaatttgcccgtgccttgtacgattttacgtaggttgcgcctcggaaaactgtaaacaagttcccgttttctctcggttttcactatctttgcagaagataggaggcggttcggcaatctttgcgtgcaagcccgcacgattgcactcacctttcactatctttgccgtatgaaaaatatcgtatttgatctgggaggtgtggttttcgggcgcgatccacgtaagtgggagccggaatttatggagttcttcgcgttcatccatgcggagaaaatgccggaattttgggtggattacgaccggggcacccttacgctcgatgaggtcgtccgtatattgagccgggaaaaggcgtgcgatgagcgggtcacggcccgttttattcgggatgcgatcgaccggcaggaggagatcgtcgaaacccgtgcgttggtcggcgacctgaaacgggtcggttataagttatatgtgctgtcgaacatgtcgcgggagttcatcgacttcctgcgcaagatgccggtttaccgctgtttcgacggggaggtcatctcctgcgaagagcaggtcgtgaagcccgagccggagatctaccgtcgtctgctcgatcgttattcgctcgatccggccgaaaccctttttatcgacgaccgtccggtgaatctcgaagccgcccgtacattcggtatttcgacttttctgttccgtcaccgcgaagcgcagcggagctgcgatgagttgcggaaaatgctgttgtgaaacgggcgctcccggctcggagccgaaatcataaattttcgtttatgaaggcgttgtggataaaaattgtcctattggccgtcgcactaccgggcgtttggggaaatgttgcggcgcaggtaaccatctctgccgatttcgatacgggcagcatcgggtcggtccgccggatcgattcggtgcggatgcttcatgccgcgaaaaattcgctggaggtgatgagcttcggaatacggtcgcgcattgaccccctcaatcccgtcgatacggcccttctgcccagcagccgctggttccattttcgcctggaaggggtgaagggaaagctgatgtttctgcatattcccaataccgagatggtgcggccgttttattcgtacgacggggaggaatacctacgcttcgatgcaggcgaatgttcgctgccgcagacggtctataaatatttcctgcacgacacggtttatgtcgcttatttcctgccttacagtcatgcccgacataaagccaaagccgacgagtgggcatgttcgcctttcgtgcgacgtcagcggatcggccggagcggagaaggacgtccgatcgaaatgctgatcctcacggatgccactgttccggacagcctcaagcgccgggtgtggattcactcccgtgtgcataccagcgaagcacctgctgcatggtatctcgaggcaatgatcgacgaactgctttccgatgcgcctctttcgcgggagattttgcgccgcacggttttctacgtggttcccgagaccaatcctgacggtgttcggggcggttattcccgttccacggcgcaaggtgtcaatcttgaaatcaactgggatcggcccgactccctgacacagcctgaagtgagggtcctgaaacgcacgatcgacagcctttcgacagagcgtcctttcgacgtagcgttgaatcttcactcccagagtgcgccgttcgtgacgtactggattcatacggcgaaatcgacctctgcaaaaatgtatcgacgcaagatgctgctgtcggccctgacggtcgcccatacgccgtattaccgtcccatcgaccagcgtttttcggaagctgctccccggtatgccgagggttggttctggcagcgcttcggcgagagaacgctggccgtgacgttcgaaacgccctatacttattataataacgatccggcaggggaatgggtttcccgggagagtttggctgaattggcacatgcgtcgctgttggccttgagcgacctgctcgatttgggcggcagcgagcgacggcaggctgattcggagcggatgaaggcgcggggcaaatggttgcgccgcacggcgaaggaccgtcagtttttcggcggttcctatctggtcgcggagcggaaaggggcctccgtatcgttcgtttttcccgatgtggccgaaggtcggtatgaagtgttcaagtggattcccggaccgctggataagaaattcgcacgcgaggaaaaccggtggcagccgatcggcgaggtcgtgcaggagcaggcggggcggctcgtgtggcgttaccaggctgcggctccgggcgatgtgctggatgtgattttgctcgtacctaaatcggagcgatagggtgaagtacaaggggacaaaaattgtaaagttgtgtcttctgcgcttatttttgtgttcgaagtgggaattttttgaacggctcgctgcaattggaatttttgacttgtcaggctttcacttggtgaaaagaaagtcaggcaactcttcaagagttgcctgactgtggggtttcttcatcgtttgtagcgagagagagacttgaactctcgacctcatgattatgaatcatgcgctctaaccagctgagctatctcgccatagctttccgtttcaaagcgagtgcaaatataaaccaaaaagttgaacggaccaaatctttctccgaaaaatatgtcctgaaaatgcatgttgaatcgtatggcattgattttgacgggtaaagggaagtaaaatgagaatcgtatatggtgcaagcgaagacttccgactttcaacctctgccgctcaagatactcaatgtcttgtccctcctggccggagcatctctgctcgtggccgtttcgtgggagattctcctgggggacccgcggcattattcgactgactacctgctgttgcaagggatcgtctgtgttgtttttctggccgatttctttgcccggatgtggatggctgaccacagttggcgttttttctttcgcaatctctatttctttcttctttccgttccctatttgaatatcgtcgattggatggggatcgaactttcgcatgcggaagcgatgctgatgggactcgtacctcttttgcgggctttgctggggctgtatgtgcttttcacctggatcatcaataatcgggttacgcgattgctgacctcctacgtcttgtcgatgttggtgttcacctatttcgccgctttgattttttatgattacgagatcgaagtcaatcctgcgttgcacgatttcggcgatgcgatctggtgggccagtatgaaccttacgactgtcggtgccgatatctttgccgtgacggccgtcggtaagatattgacggtgttgctccctacgttgggaatgatgatgttcccgattttcacggtgtatgtcactcagatttatacgcgcaacagaaagtccgactcttgatcggagtcggactttgcgcatgggatccgctttcggacggattattttttttgttcccggagcaggtcccgaatctccgtaagcaacaactcctccttggacggttccggcaccggtgccggcgcggcttcctgttttttcttcatcagcttgttcatcatcttgaccatcagaaagacgcagaaggccaggatagcgaaatccacgcactgttggatgaatgcgccgtaattccaccagatcggttccgcaggaacactctccgccgtacccgacccgattgcgtcggtcactacgtgtgtcgctttcgaggagaggtcgcgcaccttgctgatgtcgagccgcagcgacgagaagtccgtattgccgatcagggcgccgatgggcggcatcaggatgtcattgaccaacgatgaaacgatttttccgaacgcaccgccgatgattacgccgacagccatgtccattacgttgcccttgagggcaaattcccgaaattctttgaaaaaagacatatacgttgatttttaaggttaattgtggcaaatgcaatacgataatatacaaagatacgaataagccgagtgcaaaagcaaattttatttgcattttgccgaggcgaagaaatcaaagatactatttatttgcaaaaagaaaaaccggtcccgctgatttttcggggaccggtcggtgatatattccggaagagagttattcttccacttctatcaggatggcatcggttgcgacgttgtcgccttcctgtacgagaatctgtttgatcgtacccgccacgtcgctggtgatcgagttttccatcttcatcgcctcgaggataaccacctcctgtccggcttttaccttgtcgccgaccttcaccttcagggcgatgaccttgcccggcaggggagcggtcaccttgtggcccgtgatggctttggcttcgaccttgtgttcgctctgggcggccgttttcggagcgtctttggctgccgtcgcttcgtaggctttcttcttctggtcggtgaggaacgtcttggcaaccatcgggaagagctcgagcagaagcacctctttttcattggcagcgagctttacgcctcctgcttcgggcagttcgggattggactgcatttggtatttcgacgtatcgtagggaatctcttcgcgtacaccgcagatcttgaaccggaattcggggtcgatcttcaccggcgtttcaccgtattcaccttttacaagggcaacgaattgcgaactcttggtcgtgtacatcggccgcccggccttttcgtccaatgcgcagcttacggcctgggcacccacgatctgcgaggtcggggtcaccagcggcggcagacctgcggccagacgtacggtcgggatcaactccatggcgcggggcaaaatttcttcggccttgagctgctggagctgtgccaccatgttggagtacatgccgcccgggatttcggccttcttgaccagttcgttcggtgccgggaatccgaaatgggcctcgatcttgtggcaggcgtcgagcagcgtctcttcgtcgtccgcttgcgctgctttgatcgcacggtcgaattcggcgtcgatctccttcggaagttcgtcggtgagcgggttgaaaggcttcggcataggcttctctttgccgaagaccgaaatttcgagctctttgcggatctccttgagctgggtgttgattttggcaacggcctccatattgactcccgtatcgatccccagtttcttgcagaagacgtagatcaactcgatagccggcgctcccgtaccgccgctgaagtaccagcagttggtatcgacgatatcgactcctgcgacgatcgccgccagcaccgatgccagaccgtagcccggggtgcagtgggtgtggaaatcgatggggacattcagattctgcttgaagagcttcaccagtttgctcacgcggtggggcgggatcagacccgacatatccttgatcgtgatcatatcggctcccagcgcctccatctgcttggctttcgagaggaagtattcgtccgtgaataccggcttcgggttcttcttgcccatcagtttgccgaagaacccgatttccggatatttcggatcgaccgtataacataccgcacagtcggcgataccgccgtactgcttcacgtattttacggtcgatttaacgttattcacgtcgttcagggcatcgaagatacgcatgatgcccaagccgctctgaatcgagttacggcagaagccgtcgatgatttcgtccgtatagggggcgtatccgaagaggttgcggccgcgcgaaagggccgtgagcttcgatacgtttccgattgccttgtgaatggtttccaggcgggtccagggattttcgttcaggtagcgcattaccgagtcgggcactgcgccgccccaaacttccatggcgtaaaagttcgcatccttgtagaaaggaaggcagcggtcgatttgggcctggttcattcgtgtagcgaaagacgactgttggccgtcacgcaacgtaagatctctgatttttaatgatttggccattgtattgaatttttaatggttgtttcccttcctttgggctcgccccgcttttttcggggaagagccgtattgttattcgaataacaaatatagtgaacaaatttggatttccaaattttgtgcaaaaatttttaataaataatttctgccccgattatcgtttctaacgaagcggaaaaaggcgtcgaatggatttttttaatcgttgtgaaacaataggttacggcgtgttgccgagagtcggttccggacaccggatttgcctctgttcctgaccgggtttcggggaatgcgggagcgtgggaattcgtgccgccggttccgaaagagatgtcgaaccttatgcgggaacagatttttcgaatttcgtatctgggattccggatcgtgtcgctgcctttttattttgttttagatacttcgcctcggcaaaatacaaataaaatttgcttttgcactcggcttattcgtatctttgtcattcgtaggacaggcgtcgatcctttcggggatattttgacgattcgcgggaggagcgtggccttgtccgttactcattttcggaaaatttacgatttacaatgactcctacggccgtactgctcaccgtgctcgggtatatcgcgatgcttttcgtcgttgcgggaatcgccggaaggcgggtgtcgaacacgggcttttttaccggtaaccgggagaatccctggtatgtggcggctctggcaatggtcggggcggcgatgtcgggcataactttcgtgtcggtgccggggtcggttgcggccgattcgttctcctacctgcaaatggtgctgggctttaccgtcgggcagatggtgatcgccttcgtgctgattccgcttttctaccggctgaaggtcgtttccctgtacgaatatctcgacggacgtttcggtatgacgacccaccttacgggggcctggttctttttcatatccaaaatgttcgccgcagcattgaaagtttacgtcgtctgcaccgtgctgcaggtgctggtgttcgacccgttcggcgtgccgttcgcggtcaatgcggctttcctggtcggattggtctggctctatacctggcggggcggtgtccgttcggtcgtctggacggatattctgcatacgtgttgtctggtggggagtatcgtgctctgcatcgtctttatcatgcggagcctcggtctgacatcggccggagtcgtgcaggccgtttgcgattcgccgatgtcgcgcatcttctttttcgaggatgccgggtcggcccgttatttttggaaaatgtttttcggaggtgtcttcacgctggtcgctatgaccggtttggatcaggatatgatgcagcggaacttgagctgccgctcaccttgggattcgcagatcaatatcgtgattacggctttcagccaaatggcggtgatcctgctttttctggtgctcggcgtgctgctctacctctatgcggaacatgccggtctgccgatgcccgagaagggcgatcaactgttcgccgtagtcgccgtgaacgctggattgccgcttgccgttggtattatgttcgttgtggggcttatatcgagtacctattcatctgccggggctgccatgacggcattgacgacttcgttcaccgtggatatcttgcgcggtccgaagcgttggggcgaagggcggctgacgcaggtgcgtatcggggtgcatgtcgtaatggcgctcgtgatggggtgcgtggtcctctttttcggccggttcggtaatgacagcgtgattaacttgattttcaaggtcgcgggttatacgtacgggcctattctgggaatgttcgcattcggcatctgcacccggcggcggattcgtgaccgctgggttccgctggtggctttcgcggctccgttgctgtcggtcgccctgcaaagtttcgtcgcatataagtacgactaccacatcggcttcgaattgatcgcttacaacgcgctgtttaccgtaatcggaatgtcgctgcttgtcgagcggcgtccgaaaccggcgtcggataattgaatataaaagatagataaacagacttaaaatagttaatattatggctttagaacaggaaatttccaaaggaatcatggaggctatgaaggccaaggataccgtacgtcttacgacgttgcgcaacgtgaagaagtatatcatcgaggcgaagaccgcttcggcgggtatcaccgaattgtccgatgccgaggtgctgaagatcattgcgaagctggccaagcagggggccgagtcggctgcggtatatgcgcagcagaaccgtcccgatctggctgccgaagagtcggcccaggtcgccgtgttgcagacgttcctgcccaaacagatgaccggcgaggaattgaccgaggccgtccggtcgatcatcgccgaggtcggtgcaacctcgatgaaagagatggggaaggtgatgggtgtcgcatcgaaaaaattggcaggtatggctgatggtaaggatatatcggccaaagtaaaagagcttcttgcttaaataatttcttgagctgacaatattccgcggaaatgagtttgttgcactccctgcatcggaatgtcaagacgatcgctatgccgatgggtatggtggtcggggctttgttatgccgtccggtgacggctgccgagagtatgtcgaacgggatgattaccccgacgctgatctttctgatgctgtttttcactttttgtcgggtgaagccccggcagatgcgattgaagatgctgcatgtctggctgctggcatttcagatcgtgggcagcgtcgcggtttatctgtcgctcgtatggttcgatccgttgttggcgcagggggccatgatctgtgtcctggctccggtggccatggcagccgtggtgatcggcggtatgttgggggccaacgtaaccacgatggccacgtacagtctgatctgcaatatggtcatcgctttggtggctccgatgctgctttcgttcgtaggggccgaccatgctacgtttctggcgattctctcccgcgtgggaccggtgctggtgctaccgttcgtctgcgcccagttgtgccgaaaattcctgccgggagcggcgttctgggtatcgaagcacagccagatttcgttttatatgtggttggtgtcgctggttgtcgtcatcggccgcacgaccgcttttatcatcgacctggagaacgccgaaccctggaccgaaatcgcactgggactcgttgcgatggtgatctgcgtggttcagttcggagtgggacggatgctgggacgccgttacggtgatgccgcagcgggcgggcagtcgttgggacagaagaatacggtgctcgccgtgtggatggcccagtcgtttctgaacccgatctcctcgatcgctccgaccgcctatatcgtgtggcagaacttcgtgaatagttatcaaatctataaaaaggatagagaaacgatgaaaaatcaaatataaaccactgtgttttaatgatttatatttgattgcgggattttcggttgtttttgcaattttcccgacaaagcccataattgcccgatatttgttactattttgttactcaaaaatactgcggaaacaaaacaaattcgctatatttgccgttgaagcaacaaacgggaagggtatggcgaagcagaaacagacggtcaaattgaaggagccggtgcgaatccggttcaagcaactctccaacgggaatcaatccatctatttggagtactatacgggcgacgtgatccgcaaggagaactatgtcggtggcaaacggaaatacgagtttctgaagctataccttattcccgagcggacgcgggaggacaaggcgaagaacgaagcgacgctcgcccttgccaaagcgattcagagcaggcggatcgtcgaggtgcagaacgacacgcacggattccagaacacgaacaagtcccgagtgaacctgctcgactatctggaaaatatcgggaagcagtccgccgagcagggaagccggaactatgcacgaacggtgctcaataccgtccgagcgttaagattgtttcgcggcgactatatcgcttttcgggacgtcgataaggagtttctctcggagtttaccgattacctgcggcagatgccgaaagccagcaaatacggcgtattgaaaaccggagggcggttgagcaacaattcggtcgtgtcttattacggtactttgagaacggcaatcaaccgtgcttacaaagaggggatcatcaccgtcaatccgaccaaagagttcgatttcgcaagtaaagtgcggcaggaaccgagccgccgcgagtatctgacactcgacgagttgaagacgctgataaataccgaatgtcggcacgagatcgtcaagcgggcttttcttttcagttgcctgtgcgggctgcgcgtcagcgacattcgcaaattgaggtggtgcgacctgcaacggagcagtgggcgtgtccgtatcgaaattacgatgcagaagaccaaagaaccgctttatctgccgatttcagacgaagcgttgaaatggctgccggagcgcggcgaggcgaacggcagtgattttatctttccgctgacgcacgaaagaacggtaaacgacacgctgcaacattgggcgaaagtcgccggaataaccaaacacatttcgtttcaatccatggaatatacggatcatcaacaaccaaaagtgttaatcccagcgatataattgcaggaatacttatccaaaatggatttataatagtgtcagagatcaagtccgaacttgcaaaagaaacggtaatcgtaaattatggtgaaagcggaaggcggaatcgcagattcggttacacgatagaggtaacaattcaattcatatcggcagatacgaaccaaatgatatgctcttgtaccgcagaaggacagggatcaaccgaagcggatgatattcgtcaggcaattaaacgagcattagacggtttatttgcagaacttcgttaactcctaccagatttataaaaaggatagagaagcgacgaaaaatcaaatataaattattcaaatataaagtataattcttattgatgatgcctatgaacaaaaggacgagcgcttactgcgaactttggacaaagaaatgatggcaggaatcaacgaatatccgttggaatatcgtcgtatgatctataaacgtattgaggcagcgaccggagaaagtgccgaaaagatcgagaaggcttatttcaagaagttggaaaagattctcaaacgcggggtaataaaggatagagaagaatatgagttggtgcatagtcgcatcgacgaattggtccataatacaccagaagacgacccagcccgaaaagacctcccggagttggaacggatctttatgaattatgccattggagaatagccaaatcgaatcgcccgtaatgctacgggcgattttttatatcgatatttttgtttgtaatttgtctgatccaagaaattcgtattacgttgaataaggaggctgtgcgtccgacgggttttatttggctgattgtcctgtggttgtatgtggtggctgacacagccgcagccgcaacctttgttgctgtcgcccggttttggataaccggctctgtttccggagatattcggcggcgtatttgccttattcggtcctatgggagttttgcatagaatttgtggaatttataaaaatgtgtaacgataatcggatgattatgaaaacaaaaaatgtattgctgggtatggctgcggtttgcggctgcgcttttcaggcgatcgcttgtaccggcatcgcgcttacggctgcggatggcagctatgtacaatcccgcactatcgaatgggcgcgtggcgtcttgcagagcgagtatgtcgtcatcccacgaggtcagcgtctgcgatcttttactccttccggagctgatggcatggttttcacatccaaatacggcgtggtgggattggccgtcgtgcagaaagagttcatcgccgaaggaatcaacgaagcgggactgtcggccggacttttcttctttccgcagtacggaggctatgaacagtacgatccggcgcagagcgaccgcacgctggccgatctgcaactcgtggcctggatactgacgcagttctcgaccatcgaccaggtgaaagcggccatcgcttcggttcgggtcgtcggactggagccctcgtcggtcgtgcattggcgtatcggagagccttccggacggcaggtggtgctggaaatcgtcggcggggtgccgcatttctacgagaacgaagtcggcgtactcaccaatgcccccggtttcgagtggcagctcaccaatctgaacaactatgtgaacctttatcccggtgacgctcctgcccggcggttgagcggcatcacgctgcgtcctatcggcggcaattccggatttctcggtcttccgggcgacgccacgccgccgtcgcgcttcgtgagagcggctttttatcgggcgacggctccgcagcgtgctaccggattcgaaaccgtgcagcaatgttttcacctgctcaacaatttcgatgtgcccatcggcatcgagcatcccgaaggggagtgtccggacatcccgagcgctacgcagtggacttcggccatcgatctgaccaatcgccgggtctattacaaaacggcctataacaatacgatccgctgcatagaccttgcgcagatcgacttcggtaaaagctcctaccagtcccatccgttggaccggatccaggaacagcccgtggaaatggtcgtccttccggagtaggttcggttacacttcgagcatctcttcgacgctgtcttcgtcggtatcgcccagactgaactccttgtcggcgaagaggtcggcaaggcccgtgatttgtttgagccgcagcagttcgtcgcggtccataccgatatgacgcatgatccactggtcggacatgttcgcccgggtcagttcggcgacgatttcgctcatcagttcgacgttgtgcgtgccgcgtgcccggttgtggcggatggtcgaggccatgcggttcgagagatccttttcgatcacggcgacggggagcaggccccgttcgcgttcgtagatccgcttcgaggttttgaggaccaggtagcggtgatagccgtccacgagttcgtagcggtcccgctccgcatcgtagtagcagacgcacggcatcgtgtagccgtcttcccagatcgacagttcgagcagcttcatttcgggcggcgcaaccacgttgggattgtagctgttcgccacgaccttctctaccggcacggcgcggacgttatagaccgggctccggtaggcgctcttcgtttgagattcagagtaacgattcatatttttccatgattttcttgcggcgctgcgtttcgttcttgttcggcgcgaagcccatgtatttgcaggcgtggtcgtttttcaaaatacagatacagatgcgcttgaaggtaggcagatggctgaattcgggcaggcttatgtcgtcgaggtactccatacgtaccggccgcttgtccgtgcgataggcgctgcggtcgccgacttcgatccgaatgccggccttttgcagcttcgtgatggtttcgtcggagaggcatccgcccttgtcgcgccagaagcggatgcttacggagagtttttccagataattgcgtcgtatcggttccggaagggtcgagagcaggaaatgcatgtagctctcccaggtcattccttgcggcaaatgaaccgactgccagcctgcggcggttgtccgaccgtacagcgctgcgaaattggctccgtttacccggcccaccatacggccccatgtgttcggatcgatggctttgtagagatgcaggcttgcgatggccggcgagatgaagggactggcgacacgctggctgtccagcggtacgcctgcgcggtaaaacaggtcgtacagccggttgtacgaccacccgaaccgtccgttcgccgtccatacgtcggttgtcagccagtcgtaaagcggataggcgttgcagatgccgctgccgacccattggcggatccatcgtttgccggcgaaccggtagtggttgcggtcgctgtaaatcgtgcgccagcggttgaagctctcctgcgtgcggatgccgatcagacagcaggtgcgcttcgcaccgctgcgtctgtggagccactcggcgaaacggttctgaaactcgtagtcccacatttcgtcggtgaagaacggaaaatcgtgctgtgtcaggcttccttccggcatttcccgtacccaaatgtcccgcatggagccgtcccacggccgccagtattgctggaacatcgaagtacaggtctgtactttgaacgggatgcagacccgatagacgtcgagaatatcggcgttcgcggccagcgtccggttcacgtagtcgagcgtatcgcggtactggatttcgtaatccatatggaacactccgattcggcgttgcaatccgtgttgccggatgtagtcgatgcagaggttgagcagcacaccgctgtccttgccgccggaaaaggagacgtagatattgtcgaaaaggtcgaaaaccgttttcaaccgttgttgtgtccgctcataaacattcatgcctgccggtttttactgtactccatcgttacgtactgcgtccactctttcatcgggacgaacccttcggagcggaatatctccgcatggcggatcagcgtcatggagcgtatcgtatagtcgcggcggtaatattggattatttcgcgtaagaagcgcgacaacagctgcgggtcgtctcccgaaacgtagtagttgttgatcttggccacaccgccgtcggtgatctctacgggtatgaacccgaagacggtttcgccctcccaggccacgaaccaggtatgcgagcgcgaagtccagaacgggtaattgttgttctggcgcagtacgctgcgccgcatgaccaacggtgcgacgagcgcgtaaaggcgaggcgaagttccgtccagtttctcgattctcatatccgaaaggctctaaagtgaccgaatgttgtatttttggatccgaatgtgttaaaaatacatcctgtccttacaaatatagtgaataacggtcgttttctcaaatttttgggtctgtgcgataattgatattttactattttattcttgattatatatcctggtgcaccgatcggctccgatcggtatgccttgacttttctcttcgaatcctttttcgaagaggaggggatggggcacgttgaataatgtgcagagtaccggactatcgccgaaataagcaagaaaacgatcgtggtatatctattatggcggattttttctgcacctaagactgttttgtatttgggaatattagcttcgatttatgaaccgtgccgatcacttcggttgaagcgatattcgtttgatgggtgtggataatggactattgttccgcagacaggaagcgacttgccgagctctgtagttcgtgacgggatgatccgccggtagactttcgtaggacaagttttcgccgctttcgtcaccgaaaagagggtctttgtccgtctcttcgaagagtctttttcctttttgttgtaaacataaaagattatttagacgaatcgatgtattccgcccgtgatatatttacaatgagtctgttacttgcggactttgatcgtgccgctctccgtgtcgaaggtgacgaacgaattgctgaacagccgttcgatgtagccgctgcacgccatatccggggtcggaaggtagcgcagcacgggtgggtcgatcagggcgatcgagtcgcagagcgaaagggcgatgtccagttcgtgcgtcgagaagaggatgcacttgcggtggtcgtgtgccagccgtcgcagcagcgtgcagagttcgtaacggttcggcaggtcgaggaacgaggtcggctcgtcgagcaggatgatcggggtgtcctgggccaaggcccgggcgatcattacccgctggcattcgccgtcggacatgcggtccatcgtttttccggcgaaagctgccatgccgaccagttccagcgagcgttccacgatggctttgtcctgttcctgtacgcgtccgatccagttggtgtagggggctcgtccgagggctacgacatcttcgcaccgcaggttgggaatgcggacccgttccgtggtgacgaagctgacggtggtggccagttgctggggtgagagcgtttccagagagtgtccgtcgagccggatttcgccccccagccgttcgccgaggccggcgatagcccgcagcagggtcgattttcccgtaccgttgcggcctacgagggcgaccagttccccggcgggaatcgtcgccgaggcgtgttgcagcagaatgcggcggccgtaaccgatagtaaggtcgttcagtcggatcatacgatgcttttgttacggatgacgacccagatgacgatggggatgcccaataacgccgtgatcgtgttgatggggaaggtgaggagtttggccagtacgtcgcaaaggagcatcaccacgatacccgtaaggatcgaggccgggaccagaatccggtggtcggcatcggcgaagaggatgcgggcgacgtgcgggacggccaggccgatgaatccgatcgggccgcagaaagcggtgaccgtaccggccagcagggtggtggagaggaagatcaactgccgtgaacggcggatgtcgagtcccatcgtgcgggcgtagttttcgcccagcaggagcaggttcagaggtttgatgaccgcgacggccagtacgagtccgagaacgacggccggaagcagcagcccgagctgtccgagcgtaacgtcgccgagcgatcccatcgtccagacgacgaaagatttgagagcggcttcgttgctcaggtattgcaggatctgcacgacggctccgacacccgacgaaaacatcatgcccaggatgagaatgaccatgatgtctttgatgcggcggctgaccgcagcgatcagcatcaggatcagcgccgagccgatccaggcggcgcccgcaatgccgagggtggagattagcgggtgtcccgtgaggcccagaagcggggcgcccagcaggaagatcgctacgccgaggctcgcgccggagctgatgcccagcacgtatggccctgccagcggattgcggaagagggtctgcatttgcagaccgctcacggcgagagcggcgccggccagtagagcgactacggctttcagcaggcggatgttcactacgatctttgccgttacggggtcgtttccgctgcccgtcagtgcggcgaggacttcgcggatcgggatgggtacggctccgaccgagagatcgacgacgaaaagtaccgccgccagaactccgaacaggagaaagaggatgcgctgccgccgttgcatcggtttagttcagttttcggtaataggtcggttcggcgtccgtcaattccgggtggaagatacggatcagatcttgcagaatcaggtccgggtgtatgacgcccgattcccagtagtcgttgccgcccgaggggttggtgcgccggttgttgttatagacccttccttcccgtacggggcgcgtatccatgaatttggggacgatctccgccagctccctgagcgatgcggcggagccgacgttgatccagcagtcggacatttcggccagccggtatgcctcctccgtgtcgatggggcgcgactgattgcccgtgtcctgggtatagacgtattgtccgcctgcgtcggcgatcagccgggcgacgtagctcgaaggcggagccatcagccaggagtcgccgtagggagtgttcagcatgacgacgggtttttgttcggctttcgccgcgagggttttcaggctgtcgtaacggaggggtatttcgcggaacacctcttcgccccgttcgcgcattccggcgatttccgctacggccacgagccattcggccttgcccagcggcgactgttcgaggtactcgcccatataggcgtagggaatacccagttcgcggagcttgggttccatggcgctggcgccgctgacgccgaacagcagcacgatgtccggggagagcgaaagcagccgctcgtagttcatgttgccgtcgtagcccacgtcgccgatctgctccttgtgcgaggcgacgtaggggttgctgatgtagtcgatgcccgatacgccgactacccgctgcggttcgcccagggcgtcgagcatggcgatgtaggtcgaggacatgcagacgatgtgccgggcgtcgccgtcgagtacctgtcccggaaaatccgccggagcctgttcgccgttgcgggcgatgaagagctgcgtttcctcgccttcggctccctgccacggggcgtatgtcttcagtatcgtgcttttcatcccttccgctccgaaaatttcgaagcccgaggaataggcgggggcgtagaggctgatgtcgaaatccccgagcgaggcggcggatcggtggtgacaggcggttgcggccgcgaggatcgccgacaacaggatataaagtagttttttcatcgtcagagtttcgttttcagcccggtcggagtttcgaggggcggtgcaaagttactgttttttattccgttttccccatttagggcggatgtcgaggaaaatctcgtagttcagccggggcatcgggcgcgaaagtaccgattgatactcttcgttgaagaggttgttgatgactcctttgagcgagaggtcggcccagcggaacgagaaggctttttcgagcgaaatgtcgctcatgaagtaaggcttcacacgtccgatcttggtcttcatatcgttgtccgaggtggtgaaacgctcgctgtaatagcaccatttgtaggtgaatcgccacgaacggtaggtcaggtgccccgttaccgaagccgaaaattcggggatgtaaacgagctgtttgccgatcgccttgtcgtaccagtccaccggatcgccgtggttgatcgagggagtccacgagaagttgccgtcggcgctcaactgccagtctttggctaactgtacgtccagccccgctttcacctccacgccgtaggcatgcacctccttgacgtttttgggcgtccagaatcctttggccgtaggcagccagacgatccagttgtcgatgtaggagtcgaaccaggtggcttcgccccgcagggtgtaaactccgtcgcggcccgtagcgaacgacagaccggcgtcgtaggtgaagccgtgctcctttttcaggtcggggttgccgcccggcaggaagtagaggtcgttcagcgacgggaaacggtagttgcgcgaaatggaggccttggcgacgaggttgccgcgtttcgagatcagatagtcggtgaagaaggccggaatgatcggcgtccattccgagccgaacatctcttcgcgcaggcctaccgaaaggcccagacgctcggtggggcggtagcggatcgacacgtatcccgacagttcgatgcggcctttgtcataaccgacgggcactttggttttgttgccgttgggatcggtcggctgctggttatccatcgggataatgtttttgtcgatgcttcgtaccagatgctggtgtgccgaaacggttgccgtgaaaagccacttctccccgaggtagtattctccatccacctggccgaagaaggtgttgatcgtgctgcgcgagcggatcatcttctccattttcccgttgccgagctcccgttcgtagtcgtaggccatccaggtatggatataaccggctttgacgcccactttccactttttgcgcaggtgatcccacgaaaggatgctgcgcagggtttgttcgcgctgttggttcaggtagtcgtcattctccttgtgatcgaccgacagcatcggaagtccccgcttcgaattgacataccaggcctgcaatccgaaacggtcgccgtgtccggtattgtaatagacctcctgcaacgcatggaaatcgtggtatgcaccgcttttgttacgttcgatcgggtagtaggagccgatgatgttgtggtcatcgtccaggataagcacgtttttatcgtagtttctgtacttgaagtcgttcggcgaggaggaatagacgacgcgtgtcgaagtttgccagcggtcgttgccgtaggtgaggcgcaaaaactcgtcgaaagtcgaaaacgagccgacaccctgcgtgtattgcaggttgaaaccgtccgcatcggcagggcgcgtggagagcttgactgccccgcccaggccgccgcccgcctcattgaccgaagaggtgccgtgcagcagcgaggcgtcgtcgatgaagtaggaggggatcatcgagaagtccgtcatgcccagcatcggggagttgattcgcataccgttccacgtcacctgcgtatgcgagggtgacgtaccgcggaacgctacggtcgaaagggtggcgcggccgtactgtttgacgaaaatcgacgtgttgaaagtcaggatgtccgccatcgagagtgcgatgttttcatgcaatatcgtagtgtcgagctgggttttctggatgccgatctccttcatcggccgccgtgccgtgacattgacttcgcggatgggaacggcatacgaaggattgccgttccaccactcgctttttttgattttctcctcctgtgcaagcccggtgagcgttgtgaggcacagtacgattgtcaataggtgtttcatcatttggattcggctccggtttcgccgtcgagcatttgttgatacgtagggttatagccgcagtccgttacgctccaggtctgttcggagagtcggggaaggacctgcgtgaaggtcgagaaatccgttaccgacgagaggttgccgatgcggactgccccggcagcggtcagggcggagaaatcgagcgttgcgaccgacttgtttttgtaggccgtgtgtccgacgctgatttctcccgcgacgctctgcagggagggaaagcggaacgcgacggcccggtcggtcgatgtgttccaggtggataccagcatgctgccgtttacctgttgcaggctcggcaggatgaattcgcccgcgcaacccgaaggcatcgtgtagagggcgtagtcgtctgccggatcatccgaaacgggctctccgttgccgacggtttccagcagcggaaattcgagggcggtgaacgacgaggcacctacgtagaacgagagctgccggccgacgtttttcagccggggaaacgaagccgaattcgcttcgcctgtcttgccgcagttgcggcagagaagtgttccccgcacttcgacgagattcggcagcgagagcgtgaacggggcttgcgatccgcaattttcgatcgtgagatcatcgcagctttccgtcggcaaagagagttcggaaatatgcgtgaatccggcgatccgcagggtatcgaggtttttgaacccggtgattccgaaaggcatcgcttccggttgcggcgtcagcgacgaggcgtcgatccgcagcgagccgccgaaatcgccgccccggagctccgtcagtcgcgtcgcggcgaccagacgcaggtcgagcgtactgttcggagaaaaagtgcatcccgagagatccagcacgccttcgagcgacggcaggtcgtcgatcgacaggtcgcctgaaatggctttgagcgccggaaggaactccccgaaatccttgatcgcggggagcgttgccaggctaacgtcgccgtcgaaacgctccgctttcgggaaggataatgtttcgatagccggacaccccgtaatttcgagcgatccggcgtcggtgagtgccggcagcaggaccgatcgcaaaatagggcagtcggtgacggtgatgttcccggtggtttcgatcagcggaaattcgaacgtattggccagagcgagatgttcgtagcgaagcgctccggcctgggtcagcacaccgaacgtggtgcccagtcccgataaccggtcgaagcgggagagggtgagcgccccgtcgatgcgttgcagtttcgggaaatacatctgttcgcacggggctttggctgcgtctgcggtcgttccgaccagcgtcatattcccggcaacggaggtcagctcgtcggccgtcagttggagcagggcgtccgactggaggacgaagtgtcccgcgacgttttgcagggatttgaaatccgccgtttgcagagccgtgccgcagatgcacagggcgcctttgacctccttcagggccgggagcgaaagctgcctgagcgtttcgttgggatgggccgcgctgccgatccgcagcgattcgcaggcggtcaggttttccagtccggccaatgtttcacccgtataggcggcggtgatcgtcaggtcgcagtggaccgaaacgaggtttttcaacccgtccagattcgtgacggggttttcttcgtcctcgcctccgatggtgaggttgccttcgacggtgttgattccgctccgggcgaaagcgtccacttcggcctgcgtccgaagtgtcaggctgccatcggtcgcaatgtcggtgcgctctaccgtatagaggtaggtgcggtcgttttgattgtcgtaggagctgaccagaaactgccactcctggttccagtcggcgacagtcgccgggtcggggtagatcgaggcatgctcgcataattcgtaggatacctgtgcgtcttccaacgatacgttgtaggggatgctcaccgtgatccggccgtcacgaatgacggccgggtaggtgtcggcgccggtagtcagcgaaaacgatactatgtagttgtcgctgccccagggcagttcggtcttctcttcgctgcatgccgtgcacagtagtgcgaggcagcagattatacctgttattttcatattccccgcctatttgccttggttgatgttttcgtccgtaaatccgaatacctccgtggagttctcgcccagccagccggctttggcattgacgccggtctgtacccggatgaagtcgatgtatttgaggttggcgggctgtccgttcttatcgaccgcgttcgagattttgaaatagaccttcatggcgcctgctgcggcattgtcgtcctccgaaagacggtcgttgccgaaattgtcggcgtagccccagtcgtattcgccgttgacccagtaggagccgttgcccgactggtcgtaggtgcggctcttcaggcagggaccgtaaagcgtatagctgtccgtgccgatccacgccgggtagtagctgggctggtcgtggtactgtttcaggtagtcgatcttgcccttgacgccctggttgtccttccattgtacgtcggctcccgagtaggtcggccggtaataggtgaccgcgtaatcctgaacggtctcctccttgccgaactccgatcctttgagttcgtaccattcgtcgtcgggcagggtgttgccgttggtgtcctgcattacatagacgatacccggttcggatgaacccttgaaggcgttgcccgtgatcgagaagttatagcctcccttgtatccggacgaggagttgtcgatgctgtggtcgaagcccacgacgatgtagccgccccagccgccgagcgatacccaggtgtttttccgcatccgttcttcggcgtaggcgactgccgcttcgggggtggtctccgtaccggtgaatccgcccgaaaccagttcgttgatgaactgtcccggggctggtgtatattcgtacacccggtcccacgtcgcgctgctggctcccgaagccgggcggcggtgcgactcttcttcgccgtggcattcgacggtgaactccagcgtagcccgggtttcattggtgcgcgtgatgcacttcgagagggtcacttcgggttcgtcggtggtgtccgttacggtgaaaacgatctttttgatccctgtttcggtcggggtataggtgtacgaaagctcgatcccgacctcttgtccgtcgatcgtccaactgaacttggggttggtgccgttccagatggatggccgcagagtgatcgtgcggtcgagcgatacggtgcgggtcagaccgtcgtatttgcgtccgataggtaccgccgtagccgataccgccagtgcatcgaccacctccacctcgattgtcatttcgtccgagccgtcctcgttttccgtgcgcagggtgacttcgtatgttccggcgacctcctcgcagaattcatagacggcctcatcgccgaccggttcggcttcggcggcacccggacggcgcagcgtccagagaaaattgctgttctcggccgactgtacggtgggcgcgaattcgtatttgcgtcctttcacgacctccagcccgtcggtctgcatggggaaggagatcaggggcggcagcagctcctgtacctcgacgagaaccgtttcgacggtcgtgccgttcggggtggttacctccaggtcgatgtagtagccgttgacgccttccgaaatttcattgccggagtcgaaccggtaggtgagctgcggttcggtcgagatgattttgcccgtttcttccagtttccatgagtaaacggcccgatcgacgaactggtaggagggcgtaatggtgaactcccggccgaccttgacgggatagacggccgggtcggtgtcgaacgtgatgatcggcacctgttcgacatcggtggtgatgagctcgtccttgttgcaggcgaccgccgtcagagcgagcaatatgaaatagatccgtattttgttcatggatgatgattcttattatatgattagcgccagcagaaggcgccggggatgatcccgacatagaattcgtcgagcagttcgccgtcgggcgaatagcgcagtacgacaccgttctgcacgtaatcgatcgcgtcggcgatatagacttccgaattgacggggttgatcgtcagtccgtagtagagcgtattgttgtagggaaggaatggttttaccggaaacttgtcggccgttaccggcaggcgccagaccgccttgttgatgaagtagatcgtgtcgcgtgtgccgttgagctgcacttcggagggccagtcgccgaatttgaacttgaactgtttctcgatcttgcgggttgcggcgtcgatgcagtagagcgatggcgcctcgtgtccgtagggcgaaccttcgtagccgccgtcggtcaccgtccagatcttgttgtacttgtccatgaccagcgaggtgggctggatgcccacggtgatctggtcgcagaccttgtcggtttcggtgtcgatcaccaggattcggttctggtacgaccagcagttggtgaagacgtatttgtcgtattgcaccatctgttcagtcgaaccggtttcgaaatccatatccgtttcgacatagccggtgatctggtaggtcttgggattgacgatgtagatgcgcggatcccagatttgggtgacgtaggctttttcgtcgctcaggaaatggatgtagcggggcgaagtgaagcccgtgatgcgtcccacctccttgaaggtgttgatgtcgatcgcatagatcacgcccgagttgttcactacgatccaaccgataccgttgcggatgaccatcgactgcgcgacgtcgcccaacttgatggcgttggctctggcgaaaacttcattctcgacatgttttttctccggatcgtaataggagagcgaggcattgccgtacatgaaattcccttcgttggtgatgaagagccccttgccggtcacctcgtcgcccgaacctgcgttgtcgatttcgaaatcctctttctctatcggaccgtaatccatgcacgacacggccagcgccgcgcatgcacagattacgattcctcttttcaacccattgaacataattctatttgtttatccattcgtccgagaaacggtaggcgaaatccacgcctgccggactcgctttcttctgatagaagctcgaaaactccagggcatcgctccgcgatacgtcatagacatggacggcgctctgcgtataggtcgatttgccgacccataactgttcggtcgtcgggtgtacgcccatgtagccgtagatgatgtcgccgcccgaatgatccgcatcgaggtctgccgtgatgtagtcccaattgaccttgccggtttcgtagttgtaacgcatcgcttcataggcgctgaagtcctgtttgccgatgaaatagaggtgcggctgcgtgaagctcgcacacatctgcactgtcggcgaagccgtgcccgtgcgcagttcgatctgttcgggcaggttcgtttccgaaacgacctcgccgttcgcgtccaacgctacgatcatagccggtttggtgaagctcgccgcaccggtcatgcccgagtttccggtaaattcgcccgtaaagatagcataaattttcccatcgtaaccctttgcgaggtctttcacctggcggttttcgtaggtgacggttttgattacggcatccgtcgcgggatcgaggacgatcaccgaattgccgcgtccggcgaagaccttgccgcgcgagaagatcatgcgggccttggtcgcccccgttttcgtgaagacgccgaatgtacccgggatgtcgctcgtacggatgatattggtctgaaggtccacgatacggatgcccgaatgggattcgttgtcggccgtggaatattggatgtaggctttttcgggacttacgaccacgatgtgctgcggccagcagagggtcgattttgaactttgggtggcacccgtagaggtatcgatgtttgcgtagaacggcatgtcgcgtgccacgaggcgtttcatcgtgtgggcatcgcagacgacgaagcgtccgtcgccgttgaatgtagttcccatgctgcttgtcttgccgttttgggtaatgaagtagatcttgccgttggccaggtacatatcctgaaggacgttgccgatttcgttgtcgttgatctcctcgtaaaccttttcatgatagcgcatgtgttggtcgaaatagacgatcgtgccgttctccgaggtcatgttgccctctatgaggacgaacgtgccttcgggatgggtgaagtcgagcacgtagtactcctgcgagaggatcggtttgtcgtcggactggatcgttacggtgttttccaaatccattccgtcggtgtattccgcaggaggagcgatcaggagcgaacgccgtgcgatatcgaaatcggccgtccagcctgccggtgccgatgtcatttcgaccgtgggaatccatcctccggccgtcagtgcatacgcttccgaagcgccgtatttcatacaaacgggttcgtccgaatcctccagcccctgaatttcgaggctgcctccgtcgcgcttggtaatctcggtcgtcaggcggtagatacggcccgcttcgaaattgcgtccggttttggtctcggtatagacgctgccgtcggcgaaggtgtaggttacgtgtatttcctctgcgctgcaatccgccggatagacgaccgctgcggcgaatacgctcgcggtgctgctcgtcgcgggcagttcgacaccctccttgccgaacgaaagcgttacggcgttgttcgcatcggtcgcatcgctgaatccggtgccgtcgaaggtgcgcgtaccggtcagtacggtcgaggcgtcggtcgctgccagcgtgacggaaacgagcttctccttcacgtcctgcgaccaggggttgaaccagacgtaagcggtggcgtgcgagagggtgaatcgtccttcggagtcggtcgtggcatagccgaaatcgccgttcggtccgagttgcagtttgcccggctccgcctggcgttgttcggtcggaacgacggcttcggcgtcggtgccggtcatgttgtaataaatccggtagggtgcatcccccgggaggttcgtgaatccgaagtcggcgacattgccgtccgttcccgcttcggcgctctgtacgccgcctgcccagattcggtcgccggtgctccattgaaattgaatttcggtcccgtcgccaggcacgaattgagtgcggctcgcggtgccggaaatacccgtgagggctacctcccgtccgggttggggaccgacttcgggaagttcctcgatgtccgaggtgcaggccgccaggccgagtcctgcgaggatgtatagtaattttttcatggcgattcgattaaatgcggatgaaaatgcctgcaatccggggaggattgccgacattttcaccgcgcgatcattctattttagtgttagccttccacatcgtatttgaaggcgaatccataagttgaggaggtcaatttaacccacgaagagtcggcgtaggctcccgtaccgccgaccagatcggccgatttcggaaggtggatgatccggttctcagcagggacgtctttgcctgcaacgggactccaaccgccgccgaagggaccggtaccgtagtcgtccttcagggtcggcggggtagttgcccgacagatgatgtcacccagcaaggggcagcctttcgagtagccgacgaaacagtatgcttcgagtgttttcatattcttgcctaacgaaatcttagccagttttggacaatctccgaaggcattctgcccgagtgtttccgtggcatccgggaggatgatctcggtcagctctccgcaattttggaatgcggaattctcgatcgtttttacaccctgaccgaagttgatcgttgtcagcgagcagccgttgaatgcgcttgctccgatcttcgtgacggaattgggcagggttacgtcggtcagtttggtgttttggaacatgtagttgccgatttcggtcacaccctcctcgacagtcacgctgacgagcgatgcgcaggagtcgaaagcgttcgatccgtagctgatgtctttcagtaccgttaccgaagtcatgcccgttttttggaaggcagccgaagcggtcgccgtgacgttctgcgggaatacgatgcctgcgaggttcgcattcgacttgaacgaattcgggaaagttgtcgattcatagacgacttcggagaaatccaccgtggcaggggccgcgagagccagaactgcatcggctacggatttcatttgagcggccgtcatcaccgtattgtcgccgacggtcttgacgtacagcgtagtgaaggtttgcggaatttctgatttccagggatcttcgccggaagcgcggtagtaaaggccttcgctcaggtagtcgggaccgagcgcctccatcgtatagccgctggcggctgtggtccaggaggagtaggcttcgaccgatgctacgtggaacgttttgctgccttgtaccgaagtacccgcgccggagaaactgtcggcctgtaccgcaggggccgtcgtcggttccgcatagacgtctgcgagcagtgcggcgttttcgaaggccttgctgccgatcgaagtcagcgtgttgcccgagatggtcaatttggtcagcttcgaccagtcggagaaagaacccgcaccgatcgtcacgatcgttttcggaatggtcaggttttcgatcgcgtcgttcgttgcgaaggcattgtcgctgatagcggtgaggcctgcaccgaattggagcgtagcgatattggggttgttgctgaaggctccgtcacccagcgtggtaacgttgtcgggcagggcgagtgccgtcaggccgcagtcggcgaaagcgcggtcgccgagggtcgtcacaccggtgcccaatgtcagggtcgccagcttggaacagccttcgaaagcgctcgcgccgattgtctgaaccgaagcgggaatggtgacggtcgtaatagccgtacagccggcgaacatttcggccgggatggtcgttgccgaaccgagggtaatggccgtgagtttggtacagtcgcggaagctcttttctccgagtgtcgtggcgtagattttcgccgaggtgagacccgtgccggcgaacgcttcgattccgatgctgtttaccgaggcgaggtcggcatccgcaagggcggcgcaactcttgaacgctttgtcgccggcggttttaacgctcgacggcagggtgagggatgccagcgctgtacatccttcgaacgtgctttcgccgatgatttcgacaccggtcggaacggtcgccttggtcagggccgtacagcctttgaaggctccggctgcgatcgatgccgtattctcgaagaatttgatcttgcccagtttggcgttgccggctaatcctgtcgggaattccgtggcttcgaatttcgccatgttcagatcaagtgtcacgggagcggactgtgccgagattttggtgatgacggtattgaactggctggcggtaagggctgcatcgtcgcctacggtgcgcacatacagtgcggtgaatgtcgcgggcagggtcggaacccagtcggcctcgcgcgaagcacgatagtagatgccgtccgtcagttgctgatcgttgatgtcctgcagcgcatatccctgcgaggttacgtccgtccaggccgtttcataggcatcgtaggatgcagccggaacatagaggatttttgcaccttccactttgctgccggcgctgccgaaggcggtgcttcccagcgagggcgcattctttgcccggcaggtgatcgtttgcagcttgtcagccatgatgaatgtattgcgtccgatcgaggtcaccttttcgcccagatcgatcgaggtgacgttggcacagttccagaaggcgtaattggcgatcgcggggatatcgataataatgcgggtgaaggcgctgcaaccgccgaacgagcgctcgtcgagcgattttagcgtttcggggaaggttacgtcctgcaacttgccgcagttgtagaaagcgtcgttgccgacagtctccagcttggagggcatattgattgtcgtgagggccgaacatgcgttgcacaggttggccggaattgcagtcagtgcatcgggaaaccgtatgctttccagtgatttgcagttcttgaatactgccgcttcaaccgaggttacactttccggaatcgtgatctctttgagtccggtcgcttcgaaagcttcagttccgatgctcttcagtgtcgagggcagggttacatcggtcagagctgtgcaactgtcgaatatgaatcgcggaattgcctccacaccttcgggaattacgaccgatgtcagcaatttgcagccgtagaacgcatagatgtccaatgtgcgcaccgaggaaggaagctcgatggattccaattgggaacattgccggaaacagttcgctccgatggctgtcagtccctccggaagagttacccgtttcaggttcgtacagttgtagaaggctccggaataggcttcggacgcaaaagtctggatattacggggcagtgcgatctcctggagattggtcttgcgggcgaagtccatcggaaattcggtcgtggcgaaggtagcttcacccaggtcgatgaccgcaccgtttgcaaggttgcctgcaatcgaggtgagttcttcggccgagagggtcgattcgcccagggtaacgactttcaggtagccgatcggctcggtcggcagctcttccgcaacaccggcttcggtcatgaagaatgcgccggagcttttgcagtcggacttggcgatctgtgtcgagaggcgcagcgtgtggcctggggtaagcgttttgcctgatttggtttgcagataaaccgaaccgtcggcgaatttatagacgatcgaaaccgttgccgtcgaaagatcggcggggtagagcaccatggaggcgaacacgtcggtatcgttgctctgcgaaggcagggcgacaccctcttcgccgaacgacagggtgacggacgaagagcctttgcagttgcccagcttcccgtcggcgaaagcggcttcgccggcgatggtctgaccgcccgatacgctcaaggtgatcgagagcaggttcgaggtgacatcgctcgaataggtgtcgaaccaaacgtaggaggtcgcatgctcgagcgtgaaggttccgttctgcgccttcgcatagccgaagtcaccgttttggcccaggttcagttctccggctgcctgctgtgtctgctcggccggaatcagggctgttgcggctgccgggccggtcaggttgtagaatacgtcgtacgtgtcggccgtttcgagggattcgaaaacgaatgtcgcctggctgccgccttcggcgatggcttcgctccgggtattgcgtgcccagatgtagtcgccggcgctccagaggaacggaacggctccgtcttcggctccgccgaaaccggtgcgggtgccccggccggagaatccggtcagtacgacctgcgtatttccgtcaggagcaggggcgataggttctacgtccgcatctttcgtgcatcctgcgaatgcgagcaggaatgcgcacaatatgtataagtagtttttcatcggtaatctcctttttatccgttagttccactcttcccattcgctcgatccggcgcctgtgccgccgaggatttcatcggtggcgagtacctgaaccttggctatgaccgttgcggtagcgcctacggctacgacggatacttcacccgaggtttcggcatatacgttctccttggcaggggctgtgatggtcagcacatcgccttcgagccaggcgcgccagccgtcgggtttggcgatggcgaggttttcaacgcctttttgggtaacggcgaggttctgcgaagcgccgaatttcagcgtcagcgatgtgcgctcgatgacgaaattcacctccttggctttgggcagaacgatctgatcgccgttggtgagcgtgaaggttacgttgtcatcgtcctgtacgacgcttttgaagaaagagtcgccgtcttctcccttatcgccgttcacaccgtccttaccgaccgctttgatcggctgtccgtcttcgcctttgatggtttcgccgtcgatctcccaatagccgtccttgttgatggtcggggttttaccgttttggcccgcaaccggaatcttgttctggttatcgtcgagcaaccactggtcatcgccgcccagcgtccagtagtagatgccttcgaattgcgcgatgccgatggccggagccgctgcgccgtccttgccgttgtgcaacgtgatggtcttgccgtcgttgaaagtgatcgtgcagcttccgtccgcggcttcggtgtagttggtgatgaatttgttttcgttcagggcgtcgatgatcgtcttgagcgaattgatctgttccttcatcgaagtgatctcctgttttaggttttcgatctcctggcggatttcggtgtcgtcgtacttgtcgtccgaacagccccaagtcattgctgcgcagcaggcagcgagaactaacagcgtaaagaattttttcataatttaagaatttgatttattggttgaattttgttttccatgttccgcagaataggcaggctgtatcggaacccgtcggttcggaggaggggattgtgctgcgccgaaacgacgaaggcgtccgccggaggaaacgaatgtccgttccggagaacgcctgaagcgcagcccggcgaaggccgggtagagtgagcgcatgtcacgcccgttgaaatgtcagccgtaaaatagccgtaagtcatcgatactcctgtcgtttagtcctgttcggaacttacacgcgagggtacagaagaaatacatggaaaaatagcgcgtcgaagactatcttgcacgatttcgacccgaaacccgcggctgtaaatcctgattgtcaaggcaggtcttctgactcgtttcctccgcaacgccttcccagcgatatagccagtggcaaagagtgcgcgaagttgcccggtcgggggctgaaactcacagcagcaggtactgtcgccgattttcacggcattccctattaatcggcttggaaaagtgattccaagtccgaaccttgcgggtgcaaaggtattgcttttccgggattattcgcaaacgaaatcggaaataaatttcaatgaattttgtaattcattgaaaaacatggttttgttaaacgactatttgcggaagatgaaatagacggccagaatcaggcagacgaaacccgccaggtggttccaccgcagggtgtccgatttcatgaagacgacggcgaagaccgtgaagaccagcagggagatgacttcttggatcactttgagctcccagatcgagaaggggcctcccagttgggagctgccgatgcggttggccgggacttggaaacagtattcgaacagggcgatccctcagctgagcaggatgatggacagcatcccgaagcgctctattttggatttgaaagcgatatgcccgtaccaagccaatgtcataaaggtattggaaaggatcagcagggcgatggtggcgagggcacggctcataatagcagagtattgagatcggttatcgaggcgaaatcgtcgatgacgacatcggcttccgtttgggttgcgagcgtatgacggggtagagtcgttgccagggccacgatgcggcctgctccggcccggcgggcagcagtgatgccgacccgggcatcctcgaatacaaggcattcggccgaaggcaggtgcagtccttcggctgccagcaggtatatttccgggtcgggcttgcagcgggtcacccggtcgccgctgacgatgcaggagaagtagtcggtgataccgcagttgctgaggacgaaatcgacgttctcgcggcagcctgaagaaccgacggcgcagcggattccgcgacggcgcagctcttcgagcagttccacgagcccccgtacggggcggatttccggagcatagacttcgcggtagatggcttctttctcctcgccgagcgctttcattcccttttcgcggatgatttcttcgggcaggatcaggcgcatgatgtcgtcgttgcccatgccgaaagcggtctggagcttgtgctgccaatcttcgacgccgtaacgctcgcagaatatctcgaatgccttgacgtgtgcctgggtattgtttaccagtacgccgtccatatcgaacaggactccccgtatcattttgttgttttttgagtcgcaaaagtaatcatatttccgggagttgccgccgaaacgaccgggaaattgcagcgtagcacttcgaggcggggccgtagtctaaaatggcgattgtagttttttagtaccctttccgacgatcgcggcatcgaactcgaggtccgtttattgcggcctgtggccgcatccgtaattccgatcctctcctgaatcccctcttcggagaggatttggacgctgcgtacctgaagaggtacctaatatatactcacgcttaaaatttgaggttaagactgaaattgaccgtgaaggtcgggatcgacagtccggggacggcgcggtgatgcgtcagacgccagatgcaatccacgcgcagcaaacggaagatgttttcgatgccgaagccggtttcgaggtaaggatgttcgaccgatgacattcctgccggaaagagcataacggctttcgtattcggaagactgccgtcgttgcgggccgagagagtgccgtaaactcctttgaaaacaaagacttcgcgccagttgagttttttgaggagcggtacgcggcccaacaggaacccgttgaagtggtgttcgtagaagaacgaaatccaggcgtccgacgagaattcgtagaaattcatgcacgagaaggcgtagcggtcgtaaaaataggtgccgtttccttcgtgcagcttcagcagcaggtagggaaccttgccgaagatcttgccgccttcgagcatgagttgcgagtaaccgatcggaggcagattgagccggtattgcatacgcccttcgagccgcaggtagtcgtagctggcgggtaagactcctctttttgcccccgtgaagtcgaaggagaaaatcgggtatttcgaacccatgtgtcgtacctcgaacggcatgcggacgatcgtttcgtctttggacagccgcagcccgatccgtatcgaagcgtcgttgatgccatgcagcgaacgcccgtccggcaggatcatcggtacgtagcggttcgaggagatgtgacggccccgcagctcgaacgaactgctgatcccgtgcagccactcgtgttcgtagagggcgatcccttcctcgatagtcgaaagccgcgaggtgccgcctcgggagaagatcgagcttaggatgttgttttccgagagggcgctgacacccgagctgagctgtatcgcgtcgttgcggtaggtgaccgtcagtttgcgcagcagttgtcggcgcagcatcaactctacctccgcagctcccttgaagtcctcgtcgcgggtgccgtaggccaggtaggtcgagagccgtacgcggcggctgaactctttggtcgtgcgtgcgcctatctggaaacgggcgccctccagtcggttgaagctgattactttggagtagggacctatgccgacgtatttggtgttgtagtagcctccgatgatagtattgaggacggtgtatatgtttttatagagggggacctgctggatcgaatcgaccatttgatagatggccttttccttttgggtgagggtgtagggacgcagcgagtcccattcgacctgcttgcccgaaatggcatcgtccgagaggatcacgctggctgacgtacccagaacctgtttggggatcggcgtgtcgaactttacgtcggaataggttacctcgtggctgcccaggaaagcgatcatcttcgaggagtcggatttggtcagcgtaaaatcggcggtcatcttctcccgctgcgggaaccacagcgagtcggccgtcaatcggttgtcggcttcgatcgccaggtggcgaatccagtttacattgactcctttggccatttttacgcgggccgaacgcagcgcatagcttgccgagtcgatattgacctcgccgtcgagtaccggggtggcgacacttttggggtgaaaccggattttgtaggtcttgcgcccctccacgttcgtactgtccaccagaaagtatttgtagaatgagcgtcccgagttggagagggggctggcgaacttcacgccgaacaggtcgatgaagttttcgtaaagattcacatcggcgtgcaggtgtccggtgaattgcgccagcacgctgttgtcttcgataccggatatctggctggcgcgaattacctcgcgggcgacggacggcgtgcggctgtggtagtaatccgccgctgtttcggagatcatcacgggcaggtagggctgtcccgtgacggacgaggtgtctaggtgctcgaagatgaaaccgaaattctgttggagttttttgctccggaattcccggatattggccagtccgagttccattttcgtataggtgcggcagatgtagcggtcgtactccttggagtcgttgtattttttgttgcggataatgccttcgaggatcggatgggccggattgtccccaggggtaattacgacgctttcgatttccaggtgcgaaggagtgagccggaagtcgatttggttgtagcccccgacgtggaccggacgtatctgaggttcataactgaccatttccgcccggatgtagctcgacgtgtcgcggctttcgagcgagtagaacccttcgtcgtcggtggtgatgccggtggtcgtacccgggaacaggacgacggcgtagggaatcggctcgcccgtctgtgcgtccgtgaccgtaccgcgcacccgggtgttctgggcggcgcagggggcgtacagaaatagtcccgcaagagcgaggagtatgccgcagagtcgtttcatcgaagcctttccggaatgtcgtttcggattttcctaaaatataaatatacccaaaaatacaaagattttaccggactgtcaaaaattattatttttgccgatccggatggaactactttctgcggaatgaaacatgggaacgtcaaaatagaaaagaccaatgcggcccgtctgctcgaccgagccaaaatcgcctacgaattgatcccgtatcgggtggatgaggagcatctggccgcgactcacgtggccgaacagctcggcgaagatgttgctgcggttttcaagacgctcgtgcttcgtggtgatcggacgggccatttcgtctgtgtcgtccctggagatcacgaggtcgatctgaaagctgccgcccgcatttcgggtaacaagaaagccgatctgattcccgtccgggagttgcttccgacgaccggatacatccggggcggctgttccccgatcgggatgaaaaaaccgttcccgacctttttccatatttccgttttgcaacactccgtcatttatgtcagtgcgggagttcggggattgcagatccggatcgctccgcaggatctgcttcgcttcgtcgggggcgaaacggccgaaatcagccgtccgtcgtctgtggcggcggaataagatccgtaattcttttttgctattcgatccctttctgcgggtcggcggaattgtcgtgttgtcgaagcgaccgccggaccggtatttcggaaacgattcgttatttctccttgggtgccggtctggtttcgcccttgagtgccggaagggagatgccgtaccgtaccgccagaatccgaatgaggatcaccgagcaggcggcgatgaactgcgtgggggccgccggcaggtcgagatacatacagagatagtagatcagtccgccgcagatgcaggcgatggcgtagatgtctttgcggaaaataaggggtacttcgttcagcagcacgtcgcgcagcataccgcccgcagcaccggtcagcgtacccatgatgatacccacccacatcggatagccgacggctatgcttttctgaatgccgacgacggtgaaaagtcccagtccgacggcatcgaaaatgaagaaggtgttgttgagccggatcacgtatttgcgtagcccgactacgaacaggaaggcgaatcccgatacgaccaggtaggagacgttttgcatccagaaagggggcaggcccagcagcaggtcgcgcagcgtaccgccgccgacggccgtgacgaatccgaccacataggctccgaaccagtcgaaatgtttggccgaagcgagccggatgccgctgatggcgaatgcgaaggtaccgacatagtcgagaagggtgatgaaattcatgatgtttcgatttttcggccgcaaaggtagtaattatctcgccggattatcgataacgacgaaataaattcgatagctgcgaccgggctgccgatttctgttttctgttaccggccgtatgatacggggcggtggcgtttcctgcgggtctttgcggaattttccggcaaggagtgttcgggtttcgttttttttcgtacttttatgcggcgtaaattcggctaggaacgatggttttacttcttcattccggttcattggtttgctttttcatgttacttaaatatttcccactatgaaattttttatcgatacagctaacttggcccagatccgggaagctaacgaaatgggtgtgcttgacggggtgacgaccaatccttcgctgatggccaaggagaacattcgcggtgaggaggcctgccgtcgccattacctcgaaatctgctccatcgtcgatggcgatgtgagcgccgaggtgatcgccaccgatttcgacggtatggtccgcgaaggggaagcgttggcggccttgcacaagaatatcgtggtcaaactcccgtgtacggccgacggtattcgtgccgtgaagtatttcgcgggcaagaatatccgcaccaactgcacgctggtcttttccgtcggtcaggctctgctggcagccaaggccggtgcgacgtatgtgtcgccgttcgtaggccgtctggacgatatttgcgagaacggggtggctctcgtcgccgagatcgtgcgtatgtatcgttactacggttatgatacgcaggtgctggcggcttcgattcggcatacgcagcacatcgtccagtgtgtcgaggcgggggccgacgtggcgacctgcccgcttgcggcgatcaagggtttgctgaaacacccgctgaccgacatcggtttggcgcagttcctggcagaccacgccaaggtgaattcgtagggaggcggcgtttcccgtaatggaaaagcgatgccgatgatcgaaaaatcatcggcatcgtcgtttcgtattcgggccggaatccgatcagatttccagccccatgatatagtcgttcatgtagaatccgcctccgatttcgaaatcgccttcgcgcaatttgcgcatacccatccgttcgtagaattttacggctttgttatggcgatttacgtggagctccatccggcagggagccgggtggagctgtttgatgtgttcgatagccttgcggaagaggaagctccccgcgtgcacaccctggaatcggggcaggatgtagattttttgcaggatgtagaggtcgtctgcttcgggctggacagagagatagccgcagggagtgccgtccttgtaggcgatgtaatatacgtgcccttcggccatctgccgccggaggttttcgggggagtacatccactccatcatgtagtccaactgttcgggcgaaaggatggttttataggtgtcgggaaatgcgacgcaggccatttcgcgtatcagtccgcaatcttcgacggaggcttttctggcagtaaacataaggtgttcgattcggtttcgctcttgcaaatatattgaaagccaggagaaaccgggaacttgttcccggttttctgaggtgcattctatctagaatatgttcaaagatggtgattctggtagtcggagagttctgtttttgtcgcgataatttgtcgggctgtatgagacggatgcctgggcaataacaaattaggccaatattgtagccacaaaatttctatagtccctcctcgacggttttccgtacaggttcctggtactgtttaccttttccgaaacggaagttgattttcaacattactctgttccaggcatttttttatatagaagtcccttgtgttctgacgatactgttctcgatggaatggtaatggctttccggattggtgaggaaattgtcgcaggagagttgaaatgcccagtctttgtatttatatctcacacctatcgcagaggataattcactgtcgtatatcatcggaatagacaatcctttacaaggtatcgcaccctgataatatgcggaaaagtttttgtagttgaaagtcagctcatagtacatcggagcctgaaaatgagtcaccctccccaatactttcgaatcgacttttgtataactgaatcctccgcctaatttcaatgccagcaagtcgtttttgaatgggctgagtctcaaatcataatgtacggagtgcacatctgcccagttgtcattaatcggtgagtatgcgatatacggctgttcatactgataatagtagtcgattggattcttgtaatataagtagctgtatgaaacatttatattgagccatttgttatgatatacgacattgaaagtcgtctggttcgcacggccgccgaccagctcgggattcccgtgtacgataatattttgattataaaacgaagtggcttcgctgagttgtcccagtcctggctgcatattggcttggacgaatccggctttcagcataaaagagggtgaaatacgataaccgatatctacccgaggcgcaaagacccattgccaaatatcgttgtcgtttgtttttgttcgtgtccctgttactcccaaagaaaaacgataagtaaaccgaggcccgatctttccggtgatctctccggcaaaataatttttcagaatgctgttagtttcccgggaatagcccgacgtgttgtctattcgatatttgctaatatcatagtaaaaataatctccgaatgaaagcgtcagcttgtcgaaagtcttggtatagagagcttggccgttcatctgatagccgtctccgtccatattaagaaaatcttcaaatacaggcgtatcgtccgataatgcgtattggttcttataggtatcggaaacagaatttatgtaatcgcctcgaagtgttatcattagttcatgccggttgcggaattgcctccagaagtacaggtcgagcgtcggattgaatgagtgggactcgctttccttcactccgtaacggtccgaacctatgccatcctgaataaaggcaagccgggaatcggtctgttgagaatgcttatcataacttgggaaaaagcgggcttgaaatacatattttccggggagttgattcgtgtatttgagactaaattgaggacttaagaagttgttttcactctgccgttcttcctcctgccggaaatccaccccgtcgagcgtatattccatttcatccgaggcatattgatcatcccatgatccgtagcctatgtttgcagtaaatgccaactgatgccgtccccggttgtattgcaggaaaaaactatcgttcaaccagggcgaagtcagatgttggttcagctccacacttccgtatattccgtcttcccgaattttcgtgataatgttgatgactttattgccgttgctgaggccgaatttgatgggcggcagatcgtagtattcgatctttcggacatcttcgggccgcagagtcgtcaattcctgttccgaagaggcgataccgtttaccaagaccgtcacactgccatcggacgcggtgatttgattggtctggcggttgattctgatctgcggaatcttgttggtcagatcgagactcgtgaccgccgccttccggtcttcattggtgatggtatataccgtccggtcgaaatagctggctgtgttgttggccgtgacgaccaccgcatcgatctctgcgacatcttcggacaggacgtaatcccggacgacctccgtcatgcctatcgaaggtttgcgaagaagcaccgtatcgtaaagagtcttgtacccgattgtccgaaccgatagcaggtagcggcccgcacggtgttttccgaaccggtaattgccggccatatcggttatcacgccttccgtgtagcgggtcgtatccggcagttgctggagaatgaccggggcgaaggcgaccggttcgtttttctcggtggtaattttacctttcaggacgatttgcgcctggagcggtgtcgccaggctcgttatgatgatcagaagaagaacggggataagtcgggggtgtctcatagttgcggagtttgaaaagaatataaaatagagtgaagacggggcggaaaaagttataacccccaattggggtcggaaatatcaggaacgttgatcgtcagattcaatacgaaattcagggcgctgtcataatagggagtttccgcataatcgaaccgataatattcgatacgtgttacgttgagagcagtcgatgcattcatgagtgtctcgtattccatcggatttgttgggataagtccgttgaacataagacataccgtaccaccgttttcgtcgatcagataaccatcttcgtaggttatgcccggaatatggctgtaaagatcctcgatcgtccgggcatcgggggcaatctgtttgggaaggtacgtttccacgggctgtacggtagcgagatccttctggctgcggatgacagggaaatgaaagtagcgccgtccttctatgccgggcacataagctatctcgatttgccgggtctgcggctggatacccggacccgatatttcgagccggtaggtccggttggtggcaatggcgtctaactcgtaataaccgttgacagatgtaagcgtcccgtattcgggttctccggtcgccggatcgtacagccacaatgaagcgaaaggtattgcctccgtcggatcggtggcatagatgaatcccgcaatacgttgttcctgacccgtcgcatgtagcgaataaccgagcaaagcgaaaaataataaaacgaatcttttcatagtcgttgaatgtttcttaattaaaaataagcattttaccgggaatcagacaaataattttcggataaaatagttgcgaaatcgaagaatggtaattttatttgtgtgatattgaactttttctatatcttatttgaatatatatttacgatggacggagttgcggagcaataaaaatatcgaggtatgacgcgaaattgcattttgaccgttgttttgaacaaaatgcagactttgtaaaaatgaattaaaatcggaaaaagaaaaatgcctgattttttcggctgcagatttcgataggatagggtaaagacaaaggcagccgataatcgatcgattatcggctgcctttccgtgatcccgctggggctcgaacccaggaccccaacattaaaagtgttgtgctctaccagctgagctacggaatcatccgcgccaatccggagttatccgttttggtggtgcaaatgtatagaaaatttttgttttgccaaaataaaacgatatttttgtacggaatattgattatcgtaaatcttaaaacaagataaattttatgtgtaaagctctgattatcggcgcaggaggcgtaggtaccgtcgtggcgcagaaaattgctgccaatccgattttttcggacgtgatgctggccagccgaacaaaagcgaagtgtgatgccattgctgcggcaatcggcggggaccgggtgaagactgcgcaggtcgatgccgacaatgtagccgatttgtgcgagttgtttcgggccttcaagcccgatatcgtggtgaacgtggcgctgccgtaccaggatctgaccattatggacgcctgcctggagtgcggggtgaactacctcgatacagccaattacgaacccaaggacgaggcgcatttcgagtattcgtggcagtgggcctatcaggagcgcttcaaggagaaggggctgacggccatcctgggctgcggcttcgatccgggagtgacagctattttcaccgcctatgccgccaaacaccatttcgacgagattcactacctcgatatcgtggattgcaacgccggtaatcacggcatggctttcgccacgaatttcaatccggaaatcaatatccgcgaagtgactcaaaaaggccgttactacgagaacggcaagtgggtggtgaccgaaccgcacgagatacacaagccgcttcattatcctgaaatcggcgagcgcgaatcttatgtgatctaccacgaggagctggagtcgctggtaaagaactatccgacgatcaagcgagcccgcttctggatgactttcggacaggagtacctgacccacctgcgcgtgattcagaatatcggcatggcccgtatcgatccgatcatttacaacggtgtggagatcgtgccgattcagttcctgaaggccgtgctgcccgatcccaagtcgctgggtgcgaactatcacggccagacttcgatcggctgccgcatccggggtatcaaggacggcaaggagcgtacgtattatatttacaacaactgcgatcacgagaaggcgttccaggagaccggtacgcaggccgtgagctttactacgggcgttccggcggcgctgggcgcttcgatgtgggccaaggggctttggcgcggtgcgggcgtgttcaacgtcgaggagttcgatcctgatccgttcctggccgaactgggaccgcagggattgccctgggtcgagaaattcgacgtcgatctggaagtctgatcgggtttcgataattggtttgaaagtccggatggtatgtaccgtccggacttttttatcggtctgtattggtgtgaaaagaggtaggtataaatacttatttattccaaatagccgggatttttgaatcccggttgggaggttttttctatttttgcgtgaatttgaaacagcatcggaaatccatgatcgattttcaaaaattaccttctccctgctttgtgctggatgagcagttgctcgaccggaatttggcggtcatcgaccgcgttcgccgggagagcggtgccgaagtgatcgtcgctttgaaggcctgtgccatgtggagtattttcccggagcttgcgcaacattccgacggagccaccgcttcgtcgctggccgaggcgaggctggttttcgaggagttcggccgtccggcgcatacgtacgctccggtatataccgaccggaatatcgaagagattctcgattgcagcgatcacatcaccttcaattccgttgcgcagttcgaacggttcggacagatggccctgctgcgcggtatttcgtgcggcctgcggatcaaccccggctattcgccggtagaaaccgatctctataacccttgcgtgcccggttcgcggctgggtattcccgccggggagctgaaggagctgcccgccggggtggaaggattgcatttccacgtgctgtgcgagtcccgccccgaacatttgcgcttggcgctcgatgccgtcgaaaagcgtttcggtcgtttcctcgaccggatcaaatggctcaatatgggcggcggacaccttatgacccacaaggattacgattgcgacgagctgatccgcattttgcaggagttcaaggcgaaatatccgaacctgcgcttgatcctggagcccggcagcgccttcacttggcggacgggttacctggtttcgaccgtggaggacatcgttgagaacggcggcgtgcgtacggcgatgctcgacgtgtcgttcgcctgccacatgcccgactgcctggagatgccctataaaccggcgatcctgggggcccgcgatccggaaccgggagagaagggctggcgtatgggcggcaacagttgtctggccggggattactacggggattggatcttcgaccgcgacctgcgggtcggcgatcgcatcgtgttcgaggatatgattcactatacgatggtcaagaccacgatgttcaacggcgtggcgcatcctgcgatcgccatcgtgcgccgcgacggagcaatagaaataatcagagaattcggctacgaggatttcaagtcccgtatgtcgtaatcattaaaccgcaatagatgaaagattttacccctacttcctacacgctggagtgtgtcgctaccggccgggagtttccggacgaagggtggacgctggacgatgcccagtgcaagtgtccttcgttgatccgtactcgttatgcaaaaaagcagctcgaactcaaatccgatgaatacgggttttacaagttcgccgactggctgcctgttcggcgaatgctggaaaactcgaaggctccggtgacctacaaaagtaaagggttggctgcgcacctcgggctggaaaatctctacattaccttcaacggctattacccggctatcggggcgcacatgactacctgttcgttcaaggagacggaggcttacagcgtctgtgcccgtatcgacgagaacgagaagcgggtgcttgtcgtggcgtcggccggcaatacggcccgcgccttcgccaaggtctgctccgacaaccggattccgctgctcttgtcggtgcctgccgacaacctcgatgccctgtggttcgacgaactgctggatccttgcgtgaaactgatctgttcggagaagggcggagattatttcgatgcgatccatttgagcaacttggcactcaagagcgataagttttatgccgagggcggtgcgaagaacgtggcacgccgcgacggtatggcgactaccgtactgtcggcagcgacgaccatcggtcggatccccgattactatttccaggccgtcggcagcggtacgggtgccattgccgcatgggaagccaatatgcgccttatcgaggacggacgtttcggcaatcacctgatgaagctgatggtttcgcagaacgcgccgttcgtgccgatgtataacgcctggcgggaggattcgcgcgacatgctccattacgacgacgacaaagcccgccgtgacgtggagatcatcgacgccaaggtgctgtcgaaccgcaaaccgccttatagtatcgccggcggtctttacgatgcgctgaaagccaccgacggcgagatgttcgcgctgaccaatgcccacgcccgcaaagcgaggcgtctgttcctcgagttggaaggcgtcgatatctattcggcggccggcatcgccaccgcatcgctcatcaaggccgtagaagagggtaagatcgccaaagatgccgtggtgatgttgaatattacgggcggcggcgaactccatttcaaggaggataaaacgctgtggtacctgaagcccgatcatgttttcccgatcgatcccgacccggaggaggtgatcgccaaaacggaagccttgttcgcataaaatagcgtccggacgatccgaaaaggccggcgcgacaaaaaaagaggggacgatacggaaaatcgtcccctcttttttcgtttgtctgcgatcagaacgtcgaggtcatgtctttgggtacgcagatgaagaaatcggccttaccgagtgcttcgggatcgagcttgtcggtattttcctgccggatgacctccaccgtgccgatcttcagaccgggacggtactgattgaggtaggtaatgatgccgcagtggtccgtcgagtggaagttgccgttcatgtggacgagtttcgactgcatccgttcggcgatcgaccaggccatcgtagcgtctttgaccgcttgtgccttcgaaaggttttctgcggcgctctgtttcatccccggcatcttcatggccccgaaatattcatccacgctcttgttgggcacgtaattcaggggcagcggtgcgatataccgtttcgcctcgtccgaaagcccgtccagcgcttcgaatccgcctttggcgaccatgttggcgtagcggcgtgctacgttcgtggcgacgaagggaatcttgtgctctttggcgaattcgacgatcggagagtagtcggtcttgtagttgggccagagcttggcttcggcgttgaaccgttcgggggtaatcattccggccaggtattcgtcgaggatcagttgattgtcccgctcgaacatttcggcgccgatcatcagccggtcgccgtgccggtcgtaaaggtctttgacgatttcgtattccatccagtgggcgatggggcagttgtggatttcgccgatgaatacgacatcctgccgttcgagcacgtccatcatctgcgtgtaatcgacccgattgccctgggcgtcgaacagcgtgtaggcatttttctcctgtgcccaaccgagcgttgcggtcaggcagcagatcaacgatacgaggatctttttcattttccgttctgtttattattctggtacataaatgatttctccgttttccagttcgtaggcgatgccgacgcgcttgcctttcgcaccggaaccctgctgttcggagggggtgtacttgttgatcttgttgccctccttcatgatgatctccatattttccttgccggggttcttcactacggtgaaatcttcctgcgtgaatacttcggtcatgttcatatgcattaccatagcgaccatcagcgctacggcgaagaccatcgccacgtcgaacagattgaccaccacgctcagcggatcggagtcttcctgtacggcgaacttgctttttctgcgggtcggtttcatgcttccgtgtttttttcgatcagtttccgtgatacgtagtccaggttattgacatccttggcataccagcgctgcttgaattgcagggataccaggcccacgccgctgatcacgaggcccacgaccgtcgtggcgaatacgacctgcatattgtaggacatacctgcgatgtcgcccgtcgagagtcccacgagcgccgggctcatggcgatcagcgtgccgatcagacccagtacggggccgatctttgtgaggagtttggacaggatgacgtccttctcggcgtcgttctcgaaattcgagatcaggtagtctgcgtaatcctggctggccgggttggtcagcaggtcgcgcaggtagcggatgtagagcgagttgtctttcgcgggcagcgctttgcgcaggtcgtccaccttgtccggtgtcaggtttttgatcaggtcgttcagtcgcttgtcgttcttgcgtttggccatgtactggttgtagatgccgcccacgagcagcagggcgcggatgaacagcagcaacagcagcagaatatccgggataagcaggctgttggccacccagaaaagtacttgtgaaatggtttccatataagtttatttgttttacgatttcttggaatttatgacggttcggggttgtgtcgaatgttttttgcgggcgtttctcttttgcaggacgatccatttgatgcggttccagagcgctccaagcacgaagagaaccaggaacagtccgaaggcgaatcccagtgcccgccagttcgtcggctcatcgaccgccggataggttacattgccgttgacggtggtcagcagaccgatgatgcagacgaagagactcaccagaaagtgcgtctccagccgcatctccttttccggcagcaggagccggaaaaggtagcagagcagcggaaacagcacgacgacggctgcggcgaacgcataggagatcgccgagaacgacgttccgggaaaactgaacaccaattcggtctgcaggtagaacagcacggggaagacgagcaggctggggtaccacttcaggggtttcacccaccatcgttcctgttgtccgaaccaaccccgcagcacggcgatgcagtaggcgaagcagacgaccgattcgagcgtgatgataacggccatattttgcagagccgtcgtgttttgcaggtagtcggccaactgtgtcttcgattgcagaatggcgtacgggtaggtcacgatgacgaaggcgccgcacaccgctccgaacagagcggcctgccagatcctccagaaactgagtttgagcacgcagttgatgaggatgaacaggatgagtacgctgatgattagttgcatagtatcgtattagttgtcttttctctttttgcggagcaccagcagcaggacgacgaacaacaccagtactccgccggcgatccatacgccgttcagggcgtttttccgaccttgctcaccgctggacacttcgtctttcttgagtaccatcccgttcttgttatccgggctttgtacggtcttcatggtctggatctgctgtttgtaggccgccgcatgctgcggagcgacccgtccggcgatgaattcctgcaatttggcgttgccgcccgagaatccgctgcccgtcgagccgaactcttcgaccagctccgtatgcaggctcgccagtgtgttgagctgctgctccgaggctttccacattcccttgcgggcagtttccagcattacggccgtgatttcctgcagggctgccggattctgctgacggaagaactgttcggttcccaggccgtagctgtcctcgacatacacgtcgtagatccggtcccacatctccttgtcgatgacatcgggtttggtgacgttccatccgtaggtgttggtcacgacctcggtgatctgcgatgcgctcgatgcgccgcccttcatcacctccttgacgtattccggattgaagatcgtggcgcgggattccacgccgatagcctccttgagctcctgcattttgacgttgttgcggttgcggtagtcggcgaaataggcgtcggggtccttgcccgtgacattgcgtacggccaggttcatcccgcccatgaactcatagacgtgatcgaggctcaacgcgccccaggtgttgctctgacggggctgtacgacggcgtccgtgttgtggagcacggcccgcagcagtccggccttcatctctccccactcttcgtcgctgccgtacacggcgcccatgttgttgatgtaggcgtcggcgatctcctgttcgtcggtccacttgtcgccgctggtgatcatgtcctggatgccggttccgtacatgccgttcacacctccgaatacccgctgcgtggacatttcacgcgcgtctttcggggatacgccctgctcgacgagcaggcgttcggtctccaccgtgctttccgccacgcggttgccgtaccggtcgtcggtcgctgccgccgccatctcgacggcccgcgaaatcagtgccaggcgcgatgccgccaggtcgcggaactgccccgaggtctgcacgattacgtccacgcggggccggcccaactgctcggaagggatcagccgcaggtcggacacgcggccgtaggcgtcgcgtaccggctctacgcccagcatgtagagcacctgggcgatcgtcgcaccttcgctctcgataaattcactgctccagaaggtgtagctgactttgcgcggatagtcgccgtgcgttttcttgtattgtgcgagcgtattctccgccagctccttgcccttggcccaggcctgttcggacggggtggtctctgcgttcacagcataaaggttgcggcccgtaggcaccgcctgcggattggccacggcatcgccgcccgaagtcggtgcgacgtatccgcccgccagagcgttcagaatcgagcgcatctccatttccggactctcctccagcgcccgtttgtagttctggatattcgtcacggtacgctccacttcggcgatggcctgcgcttcgcgtttctgatcggccgtatattccgtaggagtagttgcgcggcccatcatcatacctcgccggggcggagtgaggatcgtgtgcgcttcggcgagcttctccggggtgattcccgctacgcggcagaccagtgcgtcgtcggctttctgtccgccgagtacctggcggaccagttgtttggccggttccagatagtgctgcgtgaagaatgcctggctcttgagctgcgagtcggttacctttccgcgctggcggtcgagggccgctacgctgtatgcgatcgggtcggcgctcatggccattaccgacgaacggatcttctccggcgagtagggaacgcccgtcgtatagagctgcccggtcatcttttcgttggcgatctcctcggcgaagttttcgatgcgggcgatctcctcggcagtgtagggctgcgtgagcaggctgtccagccgcaggtcgcggtgcaggcccatcttcacggcgatcttttttacggcgatcgatgcctccggctggcgggcctcgtcggtcttgtagtacgcttcgattttgttcatcagctccttgtactgtccccgggtcttgctctccgtgaacggcggggtcaggtaggagatcgtcgtagcgtacgagcggcgtttggccatcatgctctcgccgacgttgccgatggtgtagtagtagaagtggggaagggtgcccaccagacggtcgggccagtcgtagcggcagagcgccacctgtttccggggcgtgaactccaggctgccgtgtgtgccgaagtgaatcatcgcgtcggctccgaagccgtattgcgcccagaggtaggcgccgatgtaggggtggggcggagcggttttggcgccgtgtacgatggcgaaggcgtcgtcgccgaccgcagccatgggctgcggcagcagcacgacgttgcccagatcgatgcgggctacggccaggcacggctcgccctcccggaccgtactcatatagcggcccggcgcttcgccgtacagttgcacgacgtcggcatagagctcttcgggcagggcgtcctgcacccaggattcgtattccgactttccgaccagtgccggacggccgtttttcaggaagtcgtcgaaagctccttcggcataggtgctcaatacggcaccctgcgtcatcagcagcttttcgaactctttttcggtcgcaggcaggtttttcaccgtgtagccttcggccttgagccgtttcagaagattatagagcgacggcaccgtttccagtccctgggccgtcagcgaggattgtccggcgcctttgaagtagtagatcgctactttcttttcagcattcggcttccgtttcagcgagatgaagttgccgatgatccgggtgaaattcttcagccgttcgggaatggccttgaagaggtagattccctcttcgtccagttcctgatcgttcagcacgtaggggtagatcgcgccgtccagttcgggtacgacgatactctgggacatgaatcccccgaacatccccatcgggtcgctttcccactcctcctgcgtttccagcatggagagcggcgagaagatcgggatgttccgctccttcagccactccacggctgcgtcggcctggcccatgaccatgcgcccatgcgcgaagtggatgaccgcgtcggggccgatttcccgcaggaacgccaaacgctggcggtacgacgaaacgggatagacgttcattcctgcgttttgcagcgatacgatcaggctgtcgatgttggcccggttgccgctgaaggggtcgttcagaccgcctacgattgcgattttaggggctttctcccgataaattccctgttcccggaggtatttctcataatctgccaccgtcttgaatgaaaggtcttcgtccaagtggtagagcacgtccgaagcgctctcgacagcttcttcagccggtgtgacgaagaggcgcttcgcgtcgatatgctggcggacgtagcgggccatattccggtaattccgcttgttgccgttgccgatgtaggccgagattccggccttggtgaggctgtcgaggctacagatgtcgttctccgggttggtcgcggcgtaaatgtagataggggtgccttcgtcggctgccgcgaggatctgcgctcgctgctcttcagtgattttcagacccatgccgaatcccagcaccaggtcgtaacgtccgagccggtcgagccggtcgagcggtatttcttcgtattcgatgaagttgtcttcgttggatttgacgaggctggccgtctgatagttctggaagttcaccagtccgatccgggtcgtggatgcccatttgctccacgccgcccagcagcacaggaccactgcgagtacggcgacggccgcgaggatccatttcttgttttttgccattattcgaagtgtaaattgttaagattcttgaggattgccggcgtccggatccataccggacgggccgtatcttgaaaacggactctttttgcgtggtttggccggcagtcccgtagttccggtgctgccagccaatccgatcgcatcatttcgtctatttcagcaactcgtactccagttgcggacgtccgcgctcaccgtcgtcgcccgaaccgaatttgaggaaccggagcttgtagtagttttccgcacagtccttgatgacgaagaaacggtctgccttgacacccggattctccacgcccggcatcgcgggggtgcgccagttggtgccgatcgtgttcgcttccgtctggaactccgcagatgccacgtccgcacgtttgaagtcggcatacgacttggtgtccgtcatgacgatcgctgtttccgcgccgcccaggttgttgatcgtgattacatcctgcgtgaacgagatcaccggtcccgatgccatcatggtcgaagaggcggcgtaggcccacatgatgtcccatttgctcttggcgggctggagcacctgttcgccggtttcgagcgagagtccgatgaagctgtaaatcgggtctttcgtgatttcgacggtttttggggtcgtatcttccaccttgccgtactctaccttgtagccgttgccgctgcgggtgactttcactttgtaccagaggctccggttttccgtaccgtcggtattggtcttgttgtcggccgaggccacgaaaaataccttgttgttcgcatccgtagccgatatttcgccgaatgcggtcttcgacaggtcgcccgtgacgtcgtcgatccattccgccttgaagtcttcggacatgctgcctgcggcgatgttgggtgcgctctgcgcatcttcgagggttacggctgcgaagtccgttttctcggaagcggccgctaccgttgcgtatgaagagttgagtaccacgcggaactcatcgccgcagtagaagcccaggttccagctcttgcggtcgatctgcatctggctgttattactcagatcgacatagaccatgttggcgtagttctggtcaccgactttcccttcgagcgtcatcgtgccgcccgtggagacgatcggagtgaacgagagggtcatctccttggtcgtgccgatcttgtagccttcggtcagcgagagggagagaatctggaatttcgccgttccctcggggtttttacccgtcgctttggctacggtgaaagtgcccgtggactgtccggccggaatattgaccgtgatcttgccgtcggtcatggccggggtcgtcgtgatgtccgcgtcggatacgtccgaagaggtcatttccatcgttacgtccaagctctcggtcgtagcgcggctgagtttcaggccgaggctgacggtttcgccgtccatgccggcttccgatacggcgaattcgaccgaaatgtcctgcaacttcaggttgtcgtcatcgtcgttgcatgccgagaatccgaaggtcatcagacaggctgacagtaagtaaagtaatcttttcatagaatggttttaattagttaatattgaatttgttattttttgaattttccgttcagcatcaagttcagtccgatgaagtagctgcgtccgcagccgagatagctgaccgaaggggtgtcgttcgcggattctacgatcgtgcgtatgtcggttaggttgaagaggtttttgacacctacgttcaggctcaggaacgaggtcagcttctgcgtgacggtgatgtccccgtagtggtaggaggggagtcccctcaggtaaatttcgctctctttcttgttgtccggggtcgtgtattcgtggtaatagtactccttgcgctggccggtgtatttgtagaagaaactgatgtccgttcccgacttggcgatatggtaactgatggtcgtactcacttcgggcgaatagcggaactggggcaggcttttatcgtcggaggcatatttgttgtagcgtccgatcagcgaagcattgacgttcacgcgtaatccgccccatgccagcgaggtttccagtgccccgcccagggttttgtagcggccgatgttgtagtaggtgttgtagttgggaatatcgacgttctgcgccaggctgatcttgtccttgaagacgttgtagaaaccgctcaacgtggtggtgagccggatccgcgcgttatgcaggatgcggtaggtgaacgatcccgtgacattgttcgaatattcggctttcaggtccgggttgccgtcgatgtcgtggttgtcgttgtggaacgagaagtagagctcctgcagggtcggcgtacggaagccgtaggcataggagaggcggatgtccatatcgggtgtcagatcgaacttcgttaaaatcgaaggtacggccacaggagcttcgtagtcggccatcaggaaagcccgaacgccggggcgtacgctcatccagctccagggtttgtattcggccgagatgaagaatgccagatcggagatcgtgggggtgccgtcgatgcgtccgcccttgcctccggtccattggtattccaaaccgggctgaaggctgatcttcgggccgatattccaggttgccgtcgcccgtgcgatccaggctttgtactgggtgacatcctgactggcatcttcggccgagagccatttctctccggtcgagaggtctgtccaggtggtctgcgtgcggcgcttgtagtcctggtaggagagggcgagattgacgctcaaccggttgtccagtctccagtctgcctgtaactgatgggtgtatcgtttggtcagatagtccttgtcggaaaccttctccggttcgatggcggtaccgttcagaggaccgaagattttctcgtcgaggaaatccagccggtaccagacgttcaggttgcgtcgctggaaccctatcataccgttggccagcgactggtctttgggatgccagcgcttttcgcgtccggtcaggtcgccctgccagccgccgttgtcgttgcgggtgtagccgccgttgaagtagagtccgtttttaagattgaatccgaggtcgatgctttcgttgtgaagaccttcgccgttgaagaactggtattccttgcccatcgtttcttcctggatgcgggcgcccacgcgccaggtgctttcgccggaatagcccggtccctttttggtgatgatgttgatgactcccgcaagggcgtccgtgccatagactaccgacatcggaccttcgacgatttcgacccgttcgatccggtttacgtcgagttggctgaggctctgtttggtcgagcctcggtcgatcatcggaataccgtccatgaggattttgacgttgttgccgctcatacccatcagctcgaagtccgtttctccgagcgccatgtcgttcgagaggcggatgccgatttcggtgttgagcagcgactgtacatccaggggtgccttttgccggatctgatcgctgtttaccgaccgtaccttatataaggagtttttcatggattgcggcgagaactgtccggtgacgaccacctcctccaactggttgatatcttccttgacttcgatgttcgggaatacgttttcccgaccggtttcgatggtgaccggaaactccttgcggtgggcggttacggattggacgaccatcgtatattcgcccgggggagccgcaaattcgaaattgccgtccccgtcggacatcccgccgaataccgtatttttcagcgaaaccgtgatgtattcggccggagcgccgtctgtggtgatgacattgcccgagattttgacctttacccggttttgtcccgctgcgggcaggacggacaataataataggatgacagtgcagatatttttaatcatgggcttttggttttattcgtttgcaaaagtaggggggatgaaacgggcgggcaatcacccgttttaggtatttcggaggcgagaggtagtcaaatgtggtgagcttgcccgtctgtcggattcctgagctgtttcccggatcttccgttcggtttgcggagcggtcccttgatttttgtccggccggaggtggcgttggggcggttgcgataaagtccggtcgtttttcgggtttggcggagattttgtacaagcagtatcgaaagaacttaaaaaattatcgattatgtttttcttgtggtatttattgataggtttggttgccggatggctcgccaacctgatcgtgaaagggcgggggtccggcctgatcgtcaatttagttgtcggcatcgtcggcggggtgctcggcggctggatcttctcgctgttcggacttttcgccgtaggaaccatcggcagtatcgtcacttcggtagtcggtgctatcgtattgttgtggatcgtagctgccgtaggcaataaaaaagagaaaaagatagactaaaaaattattcgtatgaatgagaaattgaatgcggacaaagagcgtctgaaggcggatctgtccgatacggtacaggatgtgaaagagcatgtggccgcgaaagccggtcaggtgaaagaacaggtcgtagcgaaagccggccaggtcaaggaaagcgcccgccagcaggcgcagcaactgaaaggacaggccaaggagcaggcaggcaaagtgctcgacaagaccagggaattggtcgataaggcatccgaaaaggtgaaagagtggtaataaaaaatagaatggaaaagagaggccggccagccatagggccggccttttcgtttgtgtgtccggacaaatggattatctttgcaccccgacaggccgaagttccgctgcagaggaaccgaggccgatattattaatcactttaatttttacaggatgaaagagatccaaacaaagcgtactccgcgcttcaggcgctggtgtcgcaaggggtacgccgctttcgcgagccttcggcgccaggttaccatcggagtcctctctgtttcgatgtccaccattctcctgtccacgacgacgcccgtgcaggcgcagaccgtcgattcgcttacgatcgccagagagctggagatcgaaaaggtcgaggtgacgggggtgaaagctacccccacgcgcagtacgatgtcgtccacctccgttttcgatcgaaaggcgggtgcttcggcgccggtccagaccctcgagtctgtgctgcgtttgagccctgcgatcgatcttcgggaacggagcggcaggggaacgcaggcggacattatgatccggggaggttccttcgaccagacgatggtcatgctcaacggtattaactttacggatgcccgaacgggtcatcagtcgcattcgctgccgatcgacatagattgcatcgcgggaatcgatctgatcgacggcgtatcgggcgtcggtgcgtatgcaggggccctgaatatccgcacgatgcctctcaaatcccgctatctgcgcatcgaggcggcgggcggcgacgacggctatgcgtacggcaatctctcgggggccgtgaccaagggacgtttttccctttttgccgccgggtcgtaccgtcgcagcgacgggtatatccacaacaccgatttcgagaactacaacggttacttgcggatgaactacgacagtgaaaaggccggatttttcgatttccaggccggttatcagaaccggtcgttcggttcgaacggtttctatgccgcgtacaatcccgatcagttcgagcatacttcgacggtgctctcttcgctgcgatgggtgaaatccgtcgggcgtttcacgctcaattcgtcggtcagctaccgcaagaatttcgaccgttacgactggacgcgcggtacgccgatgaatcatcacaatacggacaatgcgggagccgagttctgggccgactgtacgtggaagggcggtatgacctcgctgggaggcgattacacctacaaccacatttacagcaccaatctcggcgagccgcttccgactccgcacggcaaatatacccatgccaaggaccgtcacgtgggaaatctctggctacggcatgtcaaacagtgggagcgtttcgacgtttccggttcggccggggtgagcttcacgccttatgggacttcggccctgtggagcctttcgggaggctatcgtccggtgcgtgggctgcggctcgaggtcggtgcggcccagtcgatgcgactgcccaccttcaccgatctttattacacctcccctgcgcagctcaataatctggatttgaagcctgaacatgcgattacctatcgtttcgcggcggattacgcccgcagcgggtggaatgcttcgctgttcacttactaccggcaggggcgcgacatcatcgactgggtttggcgcgaggagctgggcaagtggcactccgagcaggagagcaagctcgacacctatggactggaggtttcgggcggttatacgacgaccgggtttctgcaccggatttcggtttcatacggctatatccatacgagcaaagtcgatcgggtcatcacttccagtgcgctggattatatgaagcacaaagcggcggcgacggtcgaattccgttttctgcgtaactgttcgctcacgctgaccggtgcggtatatgaccgcaacggcagctatacctattatttgcgtaatgcggacggttccctgatgttggatcccgacggcaagatgatgaccgaagtgcgtgacttcaagccttatttcctgttggacggccgtctgtcgtgggaaaagaaggggtggaagctctattttgacgtgatgaacatgaccgatacccgttatttcgatttcggcgggttggagatgcccggcgtctggttttcgggcggtatcgtcgtgacgatcgggtaatgtccggaaaagtttgtttgcggcgggccgggatcgaatcccggcccgttttatcgctgcgaaaagtgtcgtattgtgagattcggccgtggaatacgtgatagtttgtaaccgtatagtccgtttcgataaaagatttgtaactttctttggagggatatttatttatttcgtatatttgtgggtctgttttacgggctaattctgaagcgaatacaaattcttaacatactctaaaatacatggaaaaacgtattattgaatgcgtgcccaactttagcgagggccgtaacaaggctgttattcagcagattacttccgcaatcgaggcggttgacggagtcaagttgctcgacgtcgatccgggtgaagcgaccaaccgtacggtggttaccttcgtcggagaacccgaagccgtgctggaagcggctttccagggcgtcaagaaggctgccgaggttatcgatatgcgtaatcataagggagcgcatccccgtatgggtgctacggacgtatgtccgctcatcccgatcgcgggtatcacgctcgaggagtgcgccgagctggcccgtcagttggccaagcgcatcgccgacgagctgcatgtgccgacctattgctacgaggcggcggcctttacgccagagcgccgcaacctggccgtatgccgtgccggtgagtacgaggcgctgcccgagaaaatgaatcacgaaggcaaagctcccgatttcggcgaccgtcccttcgacgagggcgtagcacgcacgggtgccaccgccgtaggtgcacgcgacttcctgatcgccgtgaactacaacctgaacaccacttcgacgcgtcgcgccaacgccatcgcgtttgacgtgcgcgaaaaaggccgtccggtacgcgaaggcaattcgcccgtaggcaaacccctgaaggacgagaacggcaagaccatcatgaagcccggtacgctgaaggctaccaaggcgatcggctggttcatcgacgagtaccagatcgcccaggtttcgatgaatatcaccaatatttccgttacgccgctccacgtggctttcgacgaggtttgccgcgccgccaacgcacgcggtgtgcgtgtgaccggtaccgagatcgtcggcctgattccgaagcgcacgttgatcgaggcgggccgctatttcctgaagaagcaggagcgttcgaccggtatttccgaggaggagatcatccgtatcgccatcaagtcgatgggtctggacgagttgaagccgttcaaaccggaagagaaggtgatcgaatacctgatcgaagcggacaataagaagaagaaactggtcgatctgacctgcaccggcttcgcagaggagaccgccagcgagtccccggctccgggcggcggttcgatttccgcttacatgggtgcgctgggcgctgccctgggtacgatggtcgccaacctgtcgtcgcacaaacccggctgggacgcacgttgggaggagttctccgactgggcggacaaaggccagaagctgatgaccgagttgctgcacctggtcgatgaggataccgaagcgttcaaccggatcatgaacgtattctcgatgccgaagggtaccgacgaggagaaagctgcccgcagcgccgcattgcaggaggctacgctctacgctacgcaggtgcctctgcgtacgatgcagacctcgttcaaggtgttcgaaatcgtgaaggcgatggccgaacagggaaatcccaattcggtaaccgacgccggcgtcggagcgctggctgcccgcagcgccgtgctgggtgcgtgtctgaacgtgaagatcaatgccgccggtctgaaagaccgtgccgtcgccgatgacctgatcggccaggccaaccggatcgtcgccgatgcggagaaagccgagcgtgagattctggaaatcgtcgagagcaagattaaataatttaatacatataaaacaatgactgtaaaggaatttcaggagcagatcaaggcgggtatccccgatgtgctgcccgcaccgaaaccgtacgatcccaccatcaaccacgcgcccaagcgtaaggagatactcaccgaggaggagcgcgtgctggccatccgcaatgccctgcgctacttcccggccaagcaccacgaagtgttggcccgcgagttcgccgaggagctgcacaagtacggtcgtatctatatgtatcgtttccgtcccgattatgagatgtatgcccgtccgatcgaggagtatccccacaagtcgcgtcaggccgctgcgattatggtgatgatccagaacaacctggacaaggctgtggcgcagcatccccacgagctgattacctacggcggtaacggtgccgtgttccagaactgggcgcagtatctgcttacgatgcagtatctgtcccagatgaccgacgatcagacgctggtgatgtattcgggacacccgatgggcctgttcccgtcgcatcccgacgctccgcgcgtgatcgtaaccaacggtatggtgattccgaactattcgaaaccggacgactgggagcgtttcaacgcgctcggcgtttcgcagtacggtcagatgaccgccggctcctatatgtatatcggcccgcagggtatcgtgcacggcacgacgatcacggtgctcaacgcagcccgcaaacgtcttaccgagggtaagaaagacattcgcggcatgctcttcgtgacggccggtctgggcggtatgtcgggtgcgcagccgaaggcgggtaatatctccggtgtggtgagcatcacggccgagatcaatcccaaagcggtgcatacgcgttattcgcagggctgggtcgatgaggtttatacttcgctcgacgagttgctggcccgcgcgaagaaggcacaggagaacaaggaggccgtgtcgctggcttaccagggcaacgtggtcgatctttgggagcgtctggcagccgagaacgtcaatgtcgatctgggttccgaccagacatcgctgcacaacccctgggcaggcggttactatcccgtcggcttgagctacgaagagtccaaccgcatgatggcagaggatcccgaggagtttaagaagcgtgttcaggagtcgctgcgccgccaggtggctgcgatcaacaagctgaccgccaagggtatgtatttcttcgattacggcaatgccttcctgttggagtcttcgcgtgccggtgccgacatcatgggcgagggcggtcgtttccgctatccttcctatgtgcaggatatcatgggcccgatgttcttcgactacggcttcggtcccttccgctgggtatgtacgtcgggcaaacccgaagacctggctactacggaccgtctggctaccgaagtgctcgaagagatccgcaagaccgctccgaaggagatcgccggacagctcgacgacaatatccactggatcaaggaggccggcaagaacaagctggtcgtaggttcgcaggcgcgtatcctgtatgccgacagcgagggccgcaccaagatcgcgctcgcgttcaacgacgctatcgcacgcggtgaaatttccgcacctgtcgtattgggccgtgaccaccacgacgtgtcgggtaccgattctccgtaccgtgaaacctcgaacatctacgacggttcgaaccgtacggctgatatggctgtacagaacgttatcggcgactcgttccgcggcgctacctgggtttcgatccacaacggcggcggcgtaggctggggcgaggtaatcaacggcggcttcggtatggtgatcgacggatcggaggattccgcgcgtcatatcaaggagatgcttctctgggacgtgaacaacggtatcgcacgccgcagctgggcccgcaacgagggcgcgatgttcgctatcaaacgcgagatggagcgtactccgggcctgaaggtgacccttcccaacctggcggacgacacgctggttcgcaaggctatcgacgaagtgaaatagatcggtcgttctctccgttcggttgccgccggacggagagaatgctttcgactggctgaagcggaggggattccctgtacgccggacgtcgagagcaccgaaaaacaattcgacttatttttgagtattaacctttaataagaaatacaacgatgattcatcatatcagcgcggagcatcttacggtcgatcgtgtccgcgaaattctggaaaacaatatcaaaatcgacttgagcgaagatgcgaaaaaacgcatcgtgcgttgtcgcgaatacctggataacaagatggaaacccagaaagagcccatctacggtattacgaccggcttcggttcgctctgcaatatttcgatcgacaaggaccagctctcgcagttgcagaagaacctggtgatgtcgcatgcctgcggtacgggcgagcgcgttcctgccgagatcgtgaagctgatgctgctgctcaagatccagtccctttcgtacggcaattcgggcgtgcagctcgaaaccgtacagcgtctggtcgatttcttcaacaacgacgtgctgccggtcgtgttccagcagggatcgctgggcgcttcgggcgacctggctccgctggccaacatgtgcctgccgctgctgggcctcggcgaagtggagtacaagggtgcacggcgtccttcggacgaagtcctcaaggagttcggctggaagcctatttcgctgcaatcgaaggagggcctcgccctgctgaacggtacgcagttcatgtcggctttcggcgtatattcgcttatcaaggctcgtcgcttgagcgagtgggccgacctgatcggcgcgatgtcgctcgacgcattcgacggccgcatcaacccgttcatcgacgaggtgcatgagatccgcgcccacaaaggccagctcacgacggcccgtaatttccgccgcctgctcgagggcagcgagctgatcgcccgcccgaagaagcatgtgcaggatccctattcgttccgctgcatcccgcaggtacacggtgcgtcgaaagatacgatcgactatgtcggcagcgtgctcgagaccgagattaacagcccgacggacaacccgacgatcttccccgagaaggacattatcgtttcggccggtaatttccacggacagccgatcgctctggcgatggatttcctggctattgctgttgcggagttgggcaacatctccgagcgtcgtatttacaagctgatttcgggtgcacgcgagctgccctcgttcctggtggccaagccgggtctgaacagcggtttcatgattccgcagtatgcggccgcttcgatcgtgagccagagcaagggtctttgctggcccgcttcgtgcgactcgattccttcgtcgcagggtcaggaggaccacgtcagcatgggttccaacgctgccacgaagctctaccgtgtggtgctgaacaccgagcgtgtgctggctatcgagctgctcaatgcggcacaggccctcgagttccgccgtccgctgcgttcttcgaagcccatcgaggatctgctggcagcttaccgtaagcatgtgccgttcgtcgagaacgatcaggtgatgtacacgttgatcgacgcttcggtgaaattccttcaaaccgagaaattgtaatgttactcgttaagaacatagccaagatcgtcggtgtggacgagagcggccgtcttcgggtcaagggccgcgacatgaatgtgctcggcgagatcgacaacgcctggctgctggccgacggcgaccgtatcgccgcatacggcacgatggacaagatgccggagattactcccgacacggaagtcgtcgatgcggaggggggcatgcttttcccttcgttctgcgattcgcatacccatctggtttatgccggaagccgcgaacaggagttcctcgacaagatcaacggcttgagctacgaagagatcgccaagcggggcggcggcattttgaattccgccgaccgcttgcacgaaacttccgaggacgagctttacgagcaggcgatggaacgtatccgcgagatcatcgcaatgggtacgggctgcgtcgagatcaagagcggctacggtcttacgaccgaggatgaactcaagatgctgcgggtgatccgccgtatccgcgaaacttcgccgatcaccgtccgtgccactttcctcggagctcatgccgtaggccgggcctataaaggccgccagcaggagtatgtggacctgatctgtcgggagatgatccctgccgtcggcagggagaagcttgccgagttcgtcgatgtcttctgcgaccaggggttcttcaccgtcgaagagacggagcagatcctgcgtgcgggtgctgagtacggcctcgtgccgaagattcatgccaacgagctggccgtttcgggcggtgtgcaggtcggtgtccgcaacaaggcgctgtccgtcgatcatctggagcgcatggggaccgaggagattgaagtgctgcgtacgtccggtacgatgccgacgatgctgccgggtgccgctttcttcctggagatgccgtatcctcctgcacgggcaatgatcgagggaggtttgagcgtggctctggcttcggatttcaaccccggttcatcgccttcgggcagtatgaagatgatcgtttcgctggcctgcatcaagatgcgtatgacgccggccgaggcgatcaacgccgcgacactgaacggtgcttacgccatgggcttgagcagcgagtacggttcgatcaccgtaggcaagaaggcgaacttcttcctcacgacgaagattccttcggtggcatatctgccgtatgcctatacctctccgcttatccaccgggtattcctccgggggcaagaggtgaagtaattcgccgatatatcgttcgaagccggggcagggtattctgctccggctttttgttctttttacttcattcctcgctgataccggccggatttccggttgcacggaagaggtcgttatcttacgtatggatgaatacgttttcggacaatttcggtgtattttttgcaggaaagaaaaatatgatacgctgtttgtcgattgcgaccgtgcttacgggcatggcaataactttaaatgcacagaatatgaaaccattgactcccgaagaagagcgggtgatcgttcgaaaaggaaccgaagcgcccttttccggtaaatattacctccacgacgaagacggcacctaccgctgccgccggtgcggtgctccgttgtaccgttcgcaggataaattcgatgccggctgcggctggcccagcttcgacgatgaaattccgggtgccgtgcgccgcgaaccggatgccgacggacgccgtacggagattctctgcgccaagtgcggagcccatttgggccacgtctttacgggcgaaggatttaccgctaaaaatacgcgccattgcgtgaattccctctccctcgatttcgtgccggtagccgttccgaccgtgccggtcacggacccggcagcggcttctgccgaaaagcctgaaaatacctcgtcagccgagccgccgaaatcggtgcaaaccgaacgggctattttcgccggcggttgtttctggggcgtggagtatatgctgggtaaggtggacggagtgaagagcattcgttcgggctatatcggcggccataccgagaatcctacctacgagcaggtgtgcagccataaaacgggtcatgccgaggccgtcgaagtcgagttcgatccttcgaaagtctcttacgaaactcttgccaggctctttttcgagatacacgatccgacccagctcgacggacagggacccgacttgggcgatcagtatcggtcggagattttctatactacccctgagcagaaggaggttgccgaacggctgatccgtatcctgaaggagaagggatatagcgtggtgaccgacgtaactccggcttcccgcttctggccggctgaacaataccaccagaactactacaaccgtaaaggtacgcagccgtactgtcatcgttacaccaaacggttttgacggacggcgttcgtgaatagtcggcagggtggagtttcgctgtgtcggtcggcgttcgggtacgggaagacaggaaccgggaattgttgtactaatgctgaaaatacgttttcttttttagcggacgttgctctgcgagtaacgaataccccctgccggaatcggcagggggtgtttctgtatggtcctaatccgtcgggggcgggtccgggccggctgttgtacttcggcgaacctatgcctgttcccgatgttcgctttttccgatattcgggacggatcgccttgtcgatagcgggtggaactccgaacggcttatgctttcggatgtgtgtcttgcacctcctgtttttctacatcgaacgggttgctttgcgtgacggtcgtatgccaggggattccgatcagtgtcgatagatcgactttggcggattcgatgtagctgctcaggatcatatcgcgggcgtctgcgttctggaacggatagagttcgaacgccggcaatacggaaacgaagtgttccatgatttctgcctggatggattcgtaactcggccagtttttgttcgaggagaagcagtagatctgtaccggaaggccgttggctactggcggcagtgtccgcaccatcagcagcagttctttgctgacgaaaggatggtgtcgcagatacatcgacatgtaggcccggaacagaccgagattcgtgtcgatagttccgttcaccagcccttctggattgtccgtattggcgacttttccatcggctgcctgcttctgtttttcggttatgaattgtgccagttctttgtcgaaggctttcattttctccagaaattccggcgtgcacggtttgatgtaatcgagtttcagggtatattcgcgcatgatgcgccgtccgcccgagtcggtcatgccccgccagttgatgaacgaacccgaaaccagcgaatagggtgggacggttacgatcgtgttgtcgaagttctgaaccttcacgacatccagggatatgtcgataacggtgccgtttatgttgttctgcggcatttcgatccagtcgccgatgcgcagcatgtcgtcttcggagatcattacgcctgcgaccagtcccagaatagtatccttgaacaccagcatcaatacggctgtgaaagcacccagtcccgtaatcaggttgagcggcgatttgttgatcaggatcgaaatgataacgatcacgacgacgcagtagaaaaccacgcggaatatctggataaagcccttcatcgggcggtttttcagttgcttgttctttttcagctcatctccgaccgtgttcagtatggcatttacggagataatcagggcgatgaaaaaatagatccaggtgatcttctcgctcaggatgaaccaggcggaatctttgctgaaagcgaatggcagcagggcggaaaccatcagtggcggaatgatggccgtcagcttccgaaatacgccgtatttgaacatcgattcgaagaatccgacgcgtttgcgtttcagaatctttttcgccagatgcaccaatacggcgtggacgattcccgcgacgatgaatgcgataatcacgattacgatcagaaacaggagttcgtccattttgtcgagcatatgggacggaatgccgatccaggcgaggaattttttgattccgaacaggatggtcaatgcaaagtcgtttgtattcataaacggttggaaaaatcgaagtttgtcgtgtgtggattcgtcatttcgaatcttatcttaattattatgcaataattattcctaacgaggatcggtcgggctataagtcggagtgttcggttaaaagatgagaaatctgcggcttaaagatgttttgctgcagataataaaggagtattttggtttttctgatattcattgaaattaaaaagatcgcagggattttgagtattatagtacgtgtatgtctaatatttgtttttttcaaaaataaatagaatttgatcggatgatttttgtctgttttgttgtttttacttttctatttgttgcttttttcggggggggaaattgagcttggatttccatgaccttttttataatttaaatttcgaaaaggagaaattgcttctaaaggatctcttcgaaggttgtttaattttaaattattattgttatgaacttgtttttacgttttttgttcatgggagcggtttgcctgcttcctttggtcggttgtagcgacgatgataccgagggaacggggccagagccgacgtctgactttcaattcgagactttggagctgacgcaaggttcgttcaaggtgaagataactcccgaagacaagaatatgacttactttttcggagtgctcgaaaagtcggatttcagccagcttgaaaatcttgagagtttgcaggcagcaaacatcgaaaatataaaagccctcgcggaggctaatggagtcggggtcgaggagttcttgctggaggcattgcttaaaggagagcaggagtggaaatataatacgcttgttccggagaccgattatgtcttttacgcctatggattatcgaccgaattggagattcttacgactgtcaatacttatgaattcaagacattggtcgtcgagcaagtagaggtgaatttcaagattacggcttcggacgtgacgccgacgtcgtttacgctgaatgtcgagccggaccgaacggattgcgtatattattacgacattcttctccctgccgtatatatggattactgtggaggtgatccggcaaatttaccggcttttgtcgagaactatcttgcagagtggaaaaaaaccgagcagtatgcgacttacacgttgccggaattcattgctgaagtgactgttagcggcaaaacttccgattcctcgtttgaaaatcttctgccggagggaacttattatgccttcgcagtctgtgtggccaatgacggaacctgtatttcggaggctacggtagaaactattaggacgagcgaatctcctaaaaattcttatacggtatcctccgaagtcgttaccgatgtcgcttattcggctgtagtcacggcagagcagagtgaggcttttgccgttatgatggagcttcaggagtattttgccgacgccaaatcggatgccgaaatcattcagacgatttacgatgcttataaccagaatatttccaaatatctttatgcggatgttgcgaatgtttcgttcggaggccttattcccaacgacaaatattatcttttgatctttgcatgcaatccggacggatcgccgaaactcgacgacaagataaatctcaagaaagtcgaggtcaatacgtcgccggcagcgatgtcctcggtccaatacgaacttagcgtatcgagcataaccaagatcgatgcgatggttacggtaagggctgacggtaattatgaaaatgaaacattccttttcaattatatcacgaaagccgaatacgacgctatttcgggggacaagactgccggtctgaaggctcatatggacgcatttatcgatgccagagtgaaagattggaacgattctcatccgaattcgggcgtgatgacgcgtaaagagttcctttctcgtgctctcatgaacggcaaggaggatctgtttgtgccgatagagatcggcgggcttactcctggtactacgtattatctgtatgtttttggactcaaggccgacggtacctatacgacagagccggttacgacccaattcactaccgttgcggatcaggtgaccctggcttccctggagttcatcgtaatgtcgtacggctatccggaggagaaccggaatatgtatagggtttggacgtatgcgaataattcgaaagagcactattttcagtcgtttgtcggagaggacgagtgggctggcaagacggcttccgaagtgagggagctgctcaaagcgtccaggtggcccagttcaagctcatacaaagtggacgcacaattcggacagacttggtatggctattccgtcgcttatgacgaggcgggaattcccacgaaagtctataaactttggcatacaagccctgcggataccggagacggtttcgataatataacaggaggaacaataacagtggacatcgaggagttgtccgaatagtgatgtttttatgagaactaaaatcttatttttgatgatgcttgttgcagccggtcttatgaccggttgcggcaaggattccgaggagactcctacaaaaccggaagatccgggtgatccgattcctcccgtgacgacgacttacgaaataggggattattacgagaacggctttgtaaaaggaatcgtgatatatattgattcggagggtaagagtggaactgtggtttcgctcgatgaaactgaagccatatggtcttacaaatacgaagaaccgatggcttctttcccacagacggggcgatataatacggattgtgtatataatatggaaggatggcgggagaattatcccgggttcctgtggtgcagtgaaaaggatgttatgggagttaaaaactggtatgtgccggatcagagagagttagggcttttgtacgaggcttattccggagtgagaggaggaggcagcctgtctgacgacgaaataaggaagaacaaacagctgtttaacgacactctcaaggagaagggcggtgtcccgttgtccgatgcagtctattggacttccgccgaatgctcggcgcggatggcttatgcgttcgatatggcatccggagccatgatcgagatgcctcaggaactggataaggggatgaaatacaaattccgggctatggctgattttaaattttaaatattttggtatgaaaaaaattatgttatttttcgtcgcctgtatttcctgtattactgtggcatgcgatagtgacgacgacggtacgaaaggagatgataataaatttccggcaccggaagtgacattcagcgcgattaccggtgtctcttttactgccgggtggaatgccttggaaacagcggattcatacagatacgaggtttcgtatgagaaagacggccaagtcattgctgtagctgcacagaacaccgagacgacgactttttctttggacgggcttctgcctgctacggattattcggtccgagtggttgcaaaggccggaggaaagaccatttcggattggttttccggaactgtaaggactttaggaggtgaaagcgtaacatttaccgttacaccttatgagcgctatattgagaatgcgtttatttatccttacgccgaagtgaagccttccgattccgaggtatattattgggtaagtgctattccttccaatagcgaacgagatccgaaggagtggatgcaggaggatatcgattattatatggagttgggcaaaacttgggacgatcttgtggcggataaattgattttgaaaggtgatgccgaaagtgttccttttgctttcaccggttacgatcattattattttattgttgcgccggttggaaaaaatctttccgaaatagtcgtcagtggcgaggtttctcgtagttatagattttggtacgaggctcgggaagtgcagatgctgcatgaatcgacttacgaacagtttgccggagagtggctgttgcagacatccggtactgtaaaggaggagaatggatcactcgatgtacaggaagtgggtgaagaatttccggttaccatttctcctgctgatgataagaaatcgttttatctcaagggatggggcggggatcgaaacaaattccgggattttgcgataaaaatggatttcgaaccggcggaagacaattatcataagataggtatatcttttcctcaggacatagagacggagggggatattgtatggaagtatgtttcctggtacaattttgtcggaactgtcggtgacgaaaaagtgtatacttatttgccttatgatgataaaatgtatgagaatatgccttcgtggtcgaaaggattcatcggttttatgggaaatctcaataagactgtgattaagatttgtccgctgtattatatggatgggaacaatgaaggtgcttatataatgtctatgtggccgtatggaatcagttctacgggagatgtcgagcaagacaaactgcttaataacaaatatgaagatccggttggtccttattatttgataagaaaggatgtggcggacggtcttgtgttgcaactgcccgataccgaagaaccggatgccgacgttgccgggctgttgaatgcactgcagagtgtgcggcaggcgaatactcctcgtgaggtgttcagtgtgaaacgttgataatgtccgataacttttcgggatttgaatttgagagagcggtatccgaattaagatatcgctctcttttttgtttttataagatttgtcggtttgttgccttgtcaagggggggccatacctgatttttgcctgcaaagcgatccgaattgttattcgaagtgcttggacgatcggagtattgttgctttagtctcaaacataattttcacagtttttaacgagtcgcggaataagtcattagaattaatacaagtcttttgtcctatgatataggtttttgaaactgtttcaaactcatatcgaattttatcattgggtacgaaaatatatttgccattggaattttatagctggcttgaaattttcttggtgcttttttcgggacttgaaggctcgtcacttgtcgttttgcaatacctgattctttcttaatttcgttcttcgaagacctttggaaccggcagatatataattaccgtattgatttttgattgtgtgctttgaatgtttcagttaaggaatggcattcggaacattttgttccagataacgatccgatcccgtttgagcgataacgtgtttcccggccctatccagctctcgatatatgcgaagcgacgcagatttatggtatcgagggataagttgagcgctttgcaacttctatttacttccctttttgctgcgtcccgttgtttcggatcgataaaccgatggatacgcatctcttttctttctccatttactgtgagtcgtaatgtgataggaacttcatcattacgatttgtctttgttttacacaggtagaataaaacgctgaaagaggtctttccataatatatctttttagttacgaacttactctaaaagtctatggctggtaagattcaaagtgcagtagctgaatgcttcgagcacaaaatagggggggggctcttcctctgattattagctgcttttggagagcatttcgaaccttttttaggatacagaaaaagaaaaaagccttgtaaatatactttacaaggctttgcaatcatttgcttcgatattttgcggtatggacgggactcgaacccgcgaccccctgcgtgacaggcaggtattctaaccagctgaactaccacaccgtttgctgatttcgaatgcaaaggtagtacaaaaatctgtatctccaaacttttttctcactttttgaagaaagaaaattgcacgcttccgtaacttcttgattgccaaaagtgagggtcggacgaaaaatttatgtttttcgaatgttcgaaaacgagaaacccatccggtttgagtaaatcgcgttccagtaccagccggatgacctcttcgctgccctccagatcgtagggcgcgtccgaaaagatcaggtcgaactgcttcgcacagcttttcaggtagaggaatacattggctttgacggcgaacagattgtcgattcccaggtcggcggccgtttttttgatgaagttatagtgtacgggattgatttcgaccgaagtgacgctgtgcacgccccgcgaagcgaattcgtagctgatcgaccccgtcccggcgaataggtccaacacgtcgcactcctcgaaatcgaccaggtttcccagtacattgaacaggttctccttggcgaagtcggtcgtcgggcgtgcccgcagattcttgggcgggttgattgcccgtccccgatattttccgctgactattcgcatatggcgacgtgtttgaaatattcacgcaacaggcgtccgtcctgtttggtcgggtttccttccagccggatctcgcagttttcgatctgcagctcctgcgtcagctcccggacgtagaagagcagatcttcccccgtgggggcgatgaatgtctccgccagccgcagggtttgccgttcccatactttcaggtaggccagctcttcataacggaatatccagaggcaggatgccgtgaattccccggtacgtagcaacggggaggtccagcgtatcttctccttcagccgggcacggactttctctacggaggctttgtcggcagccatcaaagcgatgacgggctgttgcggatcggaggtgagaatacactccttctccgtcggttccattccgtttatacgcatcagggcgggagcggccttcgcgtcgaacacttcccggggaaccagcatggttttgcccgtcaatacctctatttcgaccgtttttttctctttggccggtatgtcgagcttctcttcagaaaaagagtgtccatccagcctgagccggatggacacattcttgatttcgggcttgttattcgtcgccccagttacctgcttcattgttacctttctccatggagccgaacttgatgcctccgtagttgctgaagttattctcctgatcgtccaccaggttgattacctcctgacggaagcgtaccgtgtcgaggaacattttataaggtatgcggcactctacgacggggatgaccactttcgattcggtggtcacaagacctgcttccaattcgaattccgtctggttgttcgtgccgggcacgtaacgcaggttgcgaacctgttctgcggtgagctttttcggcgtgaagatcgtgtcgatcacgtgtacccataccttttcgctgttcttgcggccgctctttttcaactgggccattgccaccgagtcatcctcatcgacgatcttgcgctcgaactccagcgagtcggtcagcacaaaattgatcagcgtgtcgaaatcgccggtgaaccggttgtacttcgttttgaagctgcgctctgcagtacggatgtccttgatgcggtcgatgacgcgtgcttcgcgggccgccttctccttggcgaagataatcggagtcgaaatctgtttgtagataacgtatatcaggcatacgataactacggcaagtacgatttggatgattctttttgtcatttttaagttatttctagtaagtttgtatcaaaatccgtcggcaataccgccgtcctttaccgatccgaagatgctaaagactcatattgcgacccaaatttacgctaaaatttgttttaatacaacatctggtcaaaaaaaaatcatcgaatcgctttcggagtatttggccgaaagcgatcctgcggccattttcgtactgaacggttacgcgggtaccggaaagacgacgttgatcgccgctctggtcagggcactcaaggattgcggcatcaaacccgtgttgctggctccgacgggacgggcggccaaggtgttgtcccgttattcgggagaaccggccctgaccattcacaagcggatctaccgccagcgcaccaatgccgactacgagtcgaaattttcgctcaacatcaaccaggaacggggtgccgtattcattgtggacgaggcttcgatgctggcaaacggttcttcggacggggcgatcttcggcagcggagcattgctcgacgatctggtgagttacgtgcgcggcggcagggactgccggttgatcctcgtgggcgacgatgcgcagcttcctccgatcggggcggattactccccggcactcgatccgaaggccttatccgtctatggagaggtaatttacacgtcgctggatgaagtggtgcgtcaggaggccgaatcggggattctgttcaacgccaccctggtacgctgcatgctggagaacggcatctgcgaggtgcctcggttcaagatggattatcccgatatagaagcagttgaaggcggtgatttcatggaaaagttgcaggattgctacgaccgttacggacgcgacgaaaccatcgtcatcacccgttccaacaaacgggcgaaccgctacaacgacggtattcgccgttacgtgctgggcgccgaggaggagatcgagagcggcgatctgctgatggtcgtcaagaacaactaccattttacggaacgcaccgaagattgccctatgaatttcctggccaacggcgatatagccaaactgcgtcgcctgaggcgtttcgaggatttttacggcttccgcttcgctacggccgtgctttcgttcgcggactacaacgacgccgagctggagtgcaagatcctgctcgataccattgcctcggagtccccgtcgctgacccgtgaggagagcaaccggctcttttgcgaggtggaaaaggattatctcgatatcaagagcaagctcaagcgattcaaagaaattcgtgagaatccgcactttaatgccgttcaggtgaagttcgcctacgccgtcacctgccacaaggcgcagggtggtcagtggcgggcggttttcatcgaccgctgtctgttcggcgacgagccgatgacgcgcgacatgctgcgctggctctatacggcgctgacccgtgcgaccgacaaactctatctggtgaatttcgatgaacggttttacgaatgaccttcgttcggaggttgcgagcggggctttgcatccgcagcatttccggatgcgtgcgatcgccaagtatctgcgaggtcgggtggtgggcggctgtcggttgcggaggcgttgttcccgcgattctgcatgggccggatcggattgccggtgatgccgggcgaagagtgagtttcttgcacagcgccccaaaataggggttgaaacaggatcatttggaaataaataatacgataaattaaaaattatgacaagcgaactgcatcctctcgaaccttttctgcctgtcggggcacgtctgctgatgctcggaagtttcccgcctcagcgggtgcggtggtcgatggactttttttacccgaacttgcagaacgatatgtggcgtatcgtcggactggtatttttcggggacaaggggtattttctgacacccgacgcgaaacgtttcgacaaggaacggatcgtgcgtttctgcgaggagaaaggattggctctttacgatacggccgaagagataattcgattgaaaaacaatgcttccgacaattttcttcaagtagtgcgcgaggtcgatctggcgcagttgttggcggcggttccgacctgccgggcgatcgtgacgacgggacagaaggctaccgatgtaatcgtgcgccttgccggttgtgccgagccgcctgtgggagagagtgtggagttcgcctatgcggaccgtacgcttcggctttatcgtatgccctcttcgtcgcgggcctatccgaaaccggtggagtggaaggcggactattaccggcggatgttcgctgcgtgtgggatgctctgatcgaattgccggttggatgaaatcgtactgcggcgatctgttccgctgtgagttttttcggggaaaacgttggtttccccgaatttttctttaactttatagagttaaatctataatttatgaccgttatgagaaaattaactctgcttttgctctgcttggcgttggggatcggcgtgtgcgacgcaaaaaagaaaaatcgaggggtgtattttcggacagatgccgaaatcgtgttggataaaccttatttcgggttgaatgtgagcaatatgattcaggttgtactcgaagccgaccgaaatcccgcttcggtccgggtcgaaaccgaaaatgtgcctgccgaggcggtttccgtgcgggtgcggcgcggtgaactcgtgctcgcgtgcgaccccggagccttgtcgtccaagagaaagaacgatatgtccaagcgggtcgtagtgtatgtgggcgccgctccgctggagtcgttttcgttgtcggggatgtcctccgttttttccgagactgagatcgataaaccgtcggttacggtcgaatgtatgggaatgagcgagttcgaatccaatattcattgcagaagcctgacgatgtctgtgtcgggtatgtcgatttacaaaggacaggtggtatgcgaggatacggcgacggtggaggcgtccggaatgagccaggccgtcgcggattttatgtgccgggatttggattgtacgctgaccggtatgtccgtttataatggaaatgtgaattgcaggcagaaagccgaggtcgcagtggatggttcgagcgaatgtaccttttcgggaacggctcggaacctgatgctggaagtgtcgggcatgagtcagttcaaagggagaaagtttttggcttcgggacttgccgactgtgacatttccggtatgagtaccgcctcggtcgcagcggcgggatcgctgaaatattgtgtgagcggtatgagcgaattcaactattcgggcgaacctgtggttatctcgacatcggtcgataacgccacggttcgacaccgttgatcgactgcggggccgattccggtaaaatgggtgtactatattgtcgtacacccatttattgcagattatatgaattatgaatgaatgcaatattctttcaatattcgttattttgaagtccttttgctccggatttttcgtatatttgcaggacgtggagcaatcctgtggaccggcatgagcgaagtcgtccgccgccggatttttagggtttactccgatgtttccgactttatcttgaaaggtaatggcaatagaaaaaaaatatgttgaaactccgctgatgaagcaatattatgcggtcaaagcggtgcatcccgatgcgattctcctgtttcgtgtcggcgatttttacgaaactttcggtgaagatgcgattaaggccagtggaattctgggcatcaccctgacgcgacgtgccaacggctccgcggcattcgtcgagctggcagggtttccctatcatgcgatcgacacctacctacccaagctggtccgagcgggcgagcgcgtggcgatctgcgaacagctcgaggaccccaaacaggtaaaagggctggtcaagcggggcgtcatcgagctggttacgccgggcgtggtgctgggagataatattttggccaacaaggaaaatacctatctggcggcggtctatttcggccggaaaaataccggcgtggcttttctcgatatttcgaccggcgaattttatgccgccgagggcagcgatgcttacatcgacaaactcatttccaacctggcgccgaaggaaatcatctaccagcgcggatacgaagaccgcttctccgatgcgttcggcagccggcactatacctatcggctcgatgagtgggtcttttcggagtcggtcaaccgggacaagctctgcaagcagttcggcactcagtcgctcaagggctttggtatcgaacagttcagcagcggcatttcggcggcaggggccattctctactacctcgaatttaccgaacataagaatacggcccatatttcgtccatttcgcgtatcgaccaggaggattacgtttgggtcgataaattcacgatccgcaacctggagctcttctcttcgaacggttcgcgcgagaagtgcgcgttcgcagacgtggtcgatcgcactcttacgccgatgggcgggcgtctgctcaagcggtggatcgccttgccgatcaaggagattgatcgcatcaacgaacgtctggatgtcgtgcagcggttttacgacgagcccgatttggccgaaagcgtcgccgagcagatttcacaggtcggcgacctggagcgcatcgcttcgcgcatagcggcggctcgggtaactccccgcgaaatcgtacagcttaaaaattcgctttcggcgatcgaactcctcaaagccttgttggaatcgaccgacgacgagcgtcttcacgcgttggccggacagatcgatttgctggcggaggttcgggagcgtatcgcccgcgaggtttaccccgacccgcagaacaatcagattcagcggggcggcattatcgccgacggcgtggacgccgaactggacgatctgcgccgcatcgctctgcatggcaaggattttctgaaccgtattcagcagcgggagagcgaggcgacgggaattccgctgaaaataagctacaacaatgtcttcggttattatatcgaagtccgcaacacgcacaaggacaaggttcccgagtcgtggatccgcaagcagacgctggccaatgccgagcggtatatcaccgaagagctgaaagagtacgaagaaaaaattctcggtgccgaggagaagatgctgttgatcgagcagcggatttacgccgaattgatcgggttcattacgcattccctgggagctttgcagcgggatgccgctgtcgtggcgcgtatcgactgcctgcaatctttcgcccgtatcgctcgggagcgcaactacgtccgtccgacgctcgacgacggtacgcgcatcgaaatccgccagggacggcatccggtgatcgaaaccctgatgccggtaggggaggagtatatccccaacgacttgctgctggacgataaggagcagcagatcgtgatgattacgggtcccaacatgtcgggtaagtcggctttgctgcggcaaacggccctcattatcctgatggcccagatggggtcgttcgttccggcgaaagcggctcatatcggcgtggtggacaagattttcacccgagtcggggcttccgacaacatttcgcagggcgaatcgaccttcatggtcgagatgctcgagtcggccagcatcctgaacaatgtttccgaccgcagcatcgtcctgttggacgaaatcggacgcggtacgagtacctacgacggtatttcgatcgcctgggcgatggtcgaatacctgcacaaccatccgacggcccgtgccaagacgctttttgcgacccactaccacgaactcaacgagatggagcagatgtgcccgcgtgtgaagaactaccacgtgagcgtcaaggaggtggataagacgatcgtcttcctgcgcaagctggagcggggcggaacggagcattcgttcggtattcacgttgcccggatggccggaatgccggcctcggtcgtagcccgcgccgaagagatcctgaagaatctggagctggtatatggcaataacgagatcgtgcccagcaagagccctcgacgccgcgaccgaaaagcgctccccggagttcgcgaggcggcggaagcgggggaccagacgcggggtatgcaactctcgatgttccagctcgacgatccggtgctggtgcagatccgagatcagatcaagggactggacatcaatgctctcactccgattgaggcacttaataaattgaatgaaatcaaaaagataaccggattatgataaagcgatactttatagttgtactgcttctttttctgtttccggccggggtgtcggcacaacgccgcccagccgctaaaaaagattggaaagcgaagtacgactacgtgggggcagcgcatgacggacgtattctcgtacaccggggcggagagggcagcgatccccgtatgggccgtttttatacggacggctgtttcggttacacggacacctgcggtacggtggtcatcccgctcatctacgactatgccgatagtttttccaatgggtttgccgtggtcggcaaaggggaaaagaacgatcgccgtttcgggcttatcgatcggcaggggcgtgaagtcgtgccctgtatctatgcggatgtcgccggtttttcgtcaggccttgtccgggtgcaggaggggatggattccgtccgccgctatgggtatgtcgatacgctgggacaggtcgtaattccattgaaatacgattatgcccgggatttttccgaaggaatggcagtcgtagccaaaggcgaatggagcggtaagtccggctatggaaaaagggattttgaatttaccgggaaatacggattcatcgatcgtcggggtaacgaagtgattgctccgatatacgacggtgcggccgatttttccgaagtgctggccgctgtcggacagatggggaaatattatgtgcgccggggatttatcgatgccgcagggacgttggtcatcccatgcaagtattacgaggtttcctcgttccgaaatggccgtgcggtcgtctgcattgtttccggcggtgctttgaagtacggcagtatcgaccggaatggacgggaaatcctaccttgtatttacgattgggtgcagcacacgccgttcggaacgacttgggtcggagaaggggaggatttcgcttcccgggcctgtaccctgctcgacgtttccggcaaaccgttgatcgactataaggtctatcaggtgaacccgagcggaaaattcgggcatgcctctgcggctgttcccgattctaccgggttgctgcgattcggagtattggacggtcgcgggcgtgttatcgtaccgttcgaatacgatgacataacgatcttttcggagtgggattcggccgctgccgcttacgtggagcgaggaatcgccgaagtgaaggggaaaaagtatccgtttgccttgcgccggggggaataaatggaagagagtatctgacaagtccgattctaacgttttcacccctgccagaatgtcttctctggcaggggtgattttcaatttcggggagttgtcggacggttcctttttgtcgtaatggactgcgtgtcgaggcgagttacacagactgcctgttgcgaaaatcgattttcggggaatggattcgcgtgctcctatttggcgttgatctgcgactggatgctgcggatcaacatgcttacggcaacggaattgaaacctccctccgggatgattacgtcggcgtatttcttcgatggctcgacgaactcctcgtgcatgggcttgactgtcgtggtatattgcgagatgaccgactgcatggtgcgcccccgctcgcatacgtcgcgcaggatgcggcgggcgaggcggatgtcggcgtccgtatcgacatataccttgatgtccatcaggtcccggagttccttgttctcgaagatcagaataccatcgacgatgattaccttcgaaggtttgaccagcacggtttcggccgttcggttgtgatcgacgaacgaatagaccggatgttcgatcggaacgttgtttttcagcgtgcggatgtgttcgacgagcatatccgtatcgaacgattgagggtggtcgtaattgagtttcgtgcgctcttcgtacgtcagttcgggatgggctttgtagtagtagtcgtggcagagcgtgactacctcttcctccttgaaagcctcctgcaatcgttttaccagcgtgcttttacccgatcctgtgccgcctgcgacaccgatgactgtcacattcataattcccgatttgtggttcttttttattctccgttttctgcgtgcgataaccgcctgaccggtttttctccgaaaacggtgtgattttttcccgtatttgcacccgcacgaagtcggtaggtatttccgatttcatctgtccgatgaagcgtcccggaatctgttttttctttttccccgccgtcggatttcggataaattacgtcaaaaaaacggtatgtttcgttttctcatttcccgtttgccgtatggccgaactccgagtgtgctgccaacttcgtcctttccgatgaacgcatcgggttagctttccgtcgcaatcgaacgatggggtagctcccgccagccaaacggatatggaaaaggattgctcccctgcggggtgcaatcctttgtaattttcgattatgcgtcgatattggcgtagtgagcgtgtttttcgatgaactcgcgtcgcgggggaacctcgtcgcccatcagcatcgagaatacgcggtcggcttcggcagcgttgtcgatggttactttgcgcagaatccgggtgtctgggttcatcgtggtttcccacaactgatgggagttcatttcaccgagacctttgtagcgctggacgtgtacgcccttgcccatttcggccgtgatctcgtcacgctccttctccgtccagcaatagcgctcctgctggccctttttcacgaggaacaggggcggggtggcgatatagacgtgcccgttttcgatcagctctttcatcttgcggaagaagaaggtaagcatcagcgtggcgatgtggctgccatcgacatcggcatcggtcatgatgatgatcttgtcgtagcggagtttttcgaggttgagcgccttgctgtcctcctccgtgccgatcgtcacgccgagtgccgtgaacatgttcttgatctcctcgttctcccacatgcgatgctcctgggctttttcgatattcaggatcttaccgcgcagcggcatgatcgcctggaagttccggtcgcgaccctgcttggccgtaccgcctgccgagtcgccctcgacgaagaagatttcggcgatcgaacggtcgcggctcgaacagtccgccaacttgcccggaaggcccgcacccgaaagcacggtcttgcgctgcaccatttcgcgggcatggcgcgccgcgtgccgggccgttgcagccaggatgactttctgtacgatggctttggcgtcgcgcggattctcctccaggtagtgactcaaggccgtcgacatcgcctgatcgaccgctgccgacacctcgtcgttgcccagtttggtcttggtctgcccttcgaactgcggttctgcgaccttgaccgaaactacggccgtcagaccctcgcggaagtcgtcgccgttgatatcgaacttgagtttggcgagcatgcctgaatcctcggcgtatttcttgagcgtgcgggtcagggcgcggcggaaacccgtcaggtgcgtaccgccctcgatcgtgttgatattattgacgtaggagtgtacgttctccgagaaggagtcgttgtactgcatggccacctcgaccggcacgccgttcttttcggtgtcgatgtagatgatcgattcggtgatggcctgaccgcgcgtggcgtccaggtattcgacgaactccttgaggccctcttccgaatagaaatggtcgccgacgtattcgccgttctcgtcccgctggcgtttgtccagcaggttcaggtggatgcctttgttcaggaatgccaactcacgcaggcggttggccaggatgtcgtacttgtattccgtcgtgagcgtgaagatactgccgtcgggtttgaaggtgatcgtggttccgcgatcgtcgcaggtgccgatcacttcgaccggcgaagtcggagcgcctttgctgtacgattggcggaatattttgccgtcgcggtggatttcggcgatgagcagcgtcgagagtgcgttcacgcacgaaacacccacgccgtgcagaccgcccgaaaccttgtagctgcccttgtcgaacttgccgcccgcatggagcacggtgagcacgacttcgagtgcggacttgccctccttttcgtggaagtcggtcgggatgcctcggccgttatccttgactgtgatcgagttgtcttcgttgatcgtaacgtcgatgtcggtacagtgtcctgccaacgcctcgtcgatcgagttatccaccacctcgtaaaccaggtggtgcaaacctttttctccgatgtcgccgatatacatggccggacgcttccggaccgcttccagaccttcgaggacctggatgttggaggcggaatactcctcttcctgcttctttatctcttttccttcagtactcatattgaccttaaatatatcgtacaaatatacggaaaagtttcgtaagatgcaataatcaagcacccctttgccattgatttttgccgcagccggatttgcggggtgcttattcgggcgaaatatcggataccggaagcgtagccggatcagtggataagagctttgataacatcccgatcgacgtcggagagatcgatcggcttgtgggtcggttgcgtgtatcgcaatccgctgatggtggcgactccctgtcggccgtttcgggtgacatagatgaaataaccgtaccggaataaatcttcgaccgaaagtaccggggactgaaacatgatttcgaacagctttttacccgtatggtctatggctataaactttccttcgtctgtttccacgatcccgattctgttttcacttatgatgggtgtgtggcatcgggcgtatttcccgaaagggacgattggacgtccggtcgcattttcatatccgaccaaccgtcggccgtttttcctgatttctttgcggtataatatcggccggggaatttcgaatgttttgagaacggcctgtatgctgccccgggaaaaatttacgtcgcaaatgaaatctactgttttcagactgtcggcgattgcagttttcagtctttttttagcggcatccgaagcatcgatgattccgcttttatgagctactatcaagggctgtatggtaatggggtttccggatggatccgggaggatacgcatccaacaggtccacagcccgtccgtgaattgtgcgaattgcatgtagtcgaagtgcagaaacagcggatcgcccagcatcggagaggggcagggaaaggaaggatatgtccaattcgtataggtcaatcgcccctcctcgaaaacgaatatgggtttcgttccgtcctggtagaatatgcctgatataggaagtgtgcctgaatagaaggtggccggataataaccggtatggtcgcggacgaaaatgccgctgaaatctatttcggagtagtctgaattgcgtatcgtgtgatcccggtagagtttgtcgtcgatcagtcgccagtaggaatggtgttcgtgatcaccgtctatgtagataacgaacccctctgcggtaggctgatgaataagtgcctggaatttttttttcgaatgcccggtcgtcgcgggccaactcgtccagcggagtgtcgtccaaccaatgtaagtccagtctgagcgtatctgtgccgatgataagactgtcggcttttgccgtggttattggggccactgccgccaataacaggaacaaccggaaaagagtgcggagtttcataacccaaacctgttttttagtcgaaattatctgtgtccggcaatgatgaatttaggtttcagggtttccgtctgtgcgggtattcgctaaatatcctgcagcatcgtttgtaccgggacctccttgatcttgcctttcgagaagaggatcgtgcgggacggatattcttcgatgagggccgtgttgtgcgtggacatgactacggcgcaaccttgacgagcgatttcctggaacagccgaatgatgccttcggccgtcagcggatcgaggttgccggtaggttcgtcggccaaaagcaggcggggacggttcagcagggcgcgggcgatgaccagacgctgctgttcgccgccggaaagctcgaacggcatcttgtagcctttggcttccagcgatacgaccttgagtacctcgtcgatccgcttgcggatttctgattcgtttttccatcccgttgccttcattacatagtataggttcatgaagacgttccggtcggtgagcagttggtagtcctggaagacgatgccgattctacgtcgcagcatcggaatctcccgtcgtttgagttttcgcaagtcgaagcctgcgacgtatccttcgccttcaatgagttgaagctcggcatataaagttttgagtaaggagcttttaccgcttcccacacgcccgatcagatagacgaattcaccggcgttgatgtcgaaattcagatcggacaagatcagttctccctgttgcagcaactttttttcggagcggctgccgaaaggatcgtccgtgtggtatatcgttacgccgcgcagccggattacgttttgttcgcccatgagtcgagttggttgaaaggttcgtggtgtccgtgtgtgccgatcggccgatgcaggacgaatgttcttcgtttcgtgccgtcgcactccgattcggacgggagcaaaggtaatgaaaatgaaggcagaataaaacaaactcttctgttttttacaccgatcatatcctaccttccacaaaggtaatgaaaatgtccgaaaaatagtctgtttcggtcatcgtgccggacaataatccgtattttttttggaactcccggtaatgaatagtatttttgttattaattatggtataaattgacaataaggggataatgggaagtgaatccatgttgcaggagatattgtgggatacgaagatcgggtggtggaaagtagatatggcccgacgggttcttttgttgtccgattatctctgtaagacgataggaactgaggagtccgagatcggttacgaccgttttctgcagtcggtcggagagccgttccgggcttcgctcaaaagcctgatgtccacggatgcgagcctgttctccgccgagcagattttttcgctgtgtggtccccggggtgaggtgtggttccgctggaaggtcctgcgccgggaaacggcagccgacaaggggctggttgtttcgggatatgcccaggaaatcagcgaaagggaggctttgccggtcgatctttgctcgatcgagcggatgaatacgcttctttatcggttgaacaatatttcgcatacgctgctttctttccttcatatcggttccatcgacgaggcgatcaacaaggttctgaccgatgtcctcaagatatttcgtggcagccggacctatatcgcggagttcgactgggataaccgcaggcatatttatacgtacgaagtgacggacaagggcgtggagagcggccgggatcggttcgatcgactttcgatggacgaaaccccctggtgggtcgagcagctcgaaaaaaggagtcctattgctctttcctgtttggacgaccttccttcccgggcaaggaacgagcatgatattctggctgcacaaaatatcggttcgctgtttgtgctgccgatgacatttcgtgataaactttgggggtatgcgggaatcgatgtgatcggggagcaccgcgattggcagaacgaggattaccaatggttcgcatcactggtcaatatcatcaatatctgtatcgaattgcagcgttcgaagcgggaggcgcaaatcgaacgcgattatttgcaaaacctctaccggtacatgccgctggggtatgtccgtttccggatgatttacgacaagacggggacgccggtcgattacaaggtgctcgattcgaattatgctgcggaaaagattatcggaaaatcccaagctgactatgtggggcggctggcgagcgagctggagatcgaagatatgcccgagtacctgaaagttttcgccaaagtattgcaggtggagctgcatgtcgaaaaggaggtccgtttgttggcttccggccggtatgttcatgtcgttatgtattcgaccactcccgaggaggtgatttgcctgctttcggatatgaccgaaatgtatgaaacgcacgaggcgctcgaccgcagtgaaaagctattgcgtaatatttatgacaatattcccgtcggtatcgaactgtacgacaggaacggcttgctcgtcgatctgaataacaaggatctggagattttcgggattcgggacaaggaggatgtgctcggggtcgattttttcaagaatcccattctcgacgaggaggtctggcgccgggtgcggaaccgggaggagttctcgttcaaggcgtattatcccttcgatcgtttgaacggttattatgttacctccaagcagggccgcctcgaaatatacagttcggtgtgtatgctttacgatgcgcaggggcggttgagcaatttcttcctgatcaatatcgacaatacggaaatcaatcgggcgcatagtcgtatcgcggagttcgaaagctcgttttcgctggtcagtcgtttcggcaaggtcggatactgtcgcttcgacctggtttcgaaagaggggtatggcgtgccgcagtggtattataacctgggcgagaaggaggatacgccgctcgatcagatcctcggtgtgtataaacatgtcaattcctccgaccgggctgaagttctggagtccatccgacaggtgaaagccggcgagatcgacagtttcagccatgatcttcggatcgatgcggacggacgacagaagtggacccgtatcaatgtgatgcgcaatcccctgaataacgatccttcgaagatcgaaatggtgtgtgtcaattacgacattaccgagttgaaggaaacggagaagaatttgatcgaagcgaagaacaaagccgaagtgagcgatcgtctgaaatcggcttttctggctaatatgagccatgaaatccgcacgccactgaatgccatcgtcggcttttcgaatctgatcgctgaaaccgaagatcccgacgaacgacgggagtatgtagccattgttcaggaaaataacgaattgttgttgaagctgatttccgacattctcgatttgtcgaagatcgaagccggaacgctcgaattcaacgatgtggaattcgatgtgaatcagatgtgtcaggagattgtacggtcgttgagcctcaaggtcctggataaaccggtggagttgcgtttcggcgatcatctgcccgaatgtcggttggtaggcgacaagacccggattacgcaggtgttgattaattttattaataatgcgttgaaattcactcgtgaagggtctgtgacattaggctaccggtgcgatgacgggatgatgcttaccttttatgtcgaagacaccggtaccgggattcccgagcaggagcaggagtctgtcttcgagcgtttcgtgaaactcaacagttttgtccaggggaccgggttgggactggccatcagcaagagtatcgtcgaacagatgggcggtcgtatcggcctgaactccgaaccgggaaagggttcttgtttttggtttacgcatccttacatccggacccggtctgtgtcggcggttgcttccgatgcggagatgcggcaaccaggcgtttcggaggggaaaatgcccgtcgttctcgttgccgaagataccgacagcaattttctgctggtgtcgctgattcttaagaaagggtatgaagtgcttcgggcccataacggagcggaagcggtgcgcatgtgccgggagttcgctccggatgtggtgttgatggatatgaagatgcccgttatggatggtttggaagctacgcggcagattcgggaggcgggaagttccgttcccatcattgccgtcacagcatatgcatacgacagcgaccgtgcgaaagcgctcgatgtcgggtgcgatgattatattgccaaaccattaacgggggatgttctgaaaaagaagctgcgtaagcatctgaaacggtagcggttccgcaggcatggtacgtgaaaatattcttgtatgcaatgccgatcgggtgaatttttatgttggatgcgcgcaaggcagaggtggggcctttggaaaataagcagacgaattttcggtgttatatcgatacgtgcaggtaatgtctgcattaggtggtggaacatcattgacagtagcaatggcttttttatgtatttttttttgggagtattagtttgcttttttttattttgcgtttaaggcaaaaaaaagcagagttcaaagatgaaacggaaaagttttatccgaattttttgcatctgtttgtggctattttttttatgcttgtgctatatattgtatgattgttaggccctttgcttaataccaatatataattcgttggttaatataattgaagaatggtttttttcctttttcttactggaggtcttagtttactttggttcattattggtctgaagatgaaaaaaacggatccgaataatgaaatagaaaagatttatcccagttattggcatttaattatagctattcttcaaattggttgtgctatattccaactttatatggtatatggcgattgattggttccgtataaaactttcaatagtgacgaggacattttggtaaagttccgataaatttggctttctgcccggtttttcgtatctttgtactcacttcaatgaaattctatccctacgaagggggtgaccggttttgacagcaggcagagtttgattgtaagcacgtcgagcattgtgtggtggctcgtaaatatcaacactcgaactacaaatggcaataatagctatgcactcgctgcctaattttcaaggaaaattggcttaatcgttggatccaaggcggtttgacgacgagtatcccggaaggccgttccgctctttaacggttttccatacggggtatcgatcatttagagatagtacggcggagggttccggccgtcgtgcgaaaattcaggaactgggatccgggttaggttgccgcctgccagacccggatagaaggacgaaacggcggataagcgtgtagaaagctttcgggttccttgtttggacgcgggttcgactcccgccacctccacattcggcgacgttccggttttccggaacgtcgctttttgtatgcggggcatcttactttgcaaagcttcatcccgcttttcagacttcagcagcactcggtcggaggggggaatacttcgcaatgttcgatttttatcggtatttcgaggaattctttgatcgggcggggtatcccgcagttccggatacagagatccatgagtctgtcgtaaatcggatgcgtcgtgttccgatcttttgcgggttctttgtaatccggagcagtactccgatacggataaattcgtatttttaactcggtttcagatactccgcctcggcaaaatgcaaataaaaatttgcttttgcactcggcttattcgtaatctttgacttcgtcttagatacttcgcctcggcaaaatgcaaataaaaatttgcttttgcgctcggcttattcgtaatctttgacttcgtcttagatacttcgcctcggcaaaatgcaaataaaatttgcttttgcactcggcttattcgtatctttgccacgtgctggcaggacttttctatattcttttttgctgggcgctggggaacggcgtcagtctgcttatcggcgggtatctgccggggagtatcgtcggtatgatcctgctgttcgcttctctctgcctgcatatcgtggatgcggagatgatccggcccgccgctcgttttctgctgggcgctatggccctgtttttcatcccgtacggggtggggttgatggtatcctacgaagtcctgctcgataatttttgggcgatcgttatttcgggcggagtgagtacgatgttggtgctggtctgcgtcggaagggtttttcaaaaactgaataaaaaggcgtgatggagcagttcgtcggatcggatctggtgttgctgaccctcacggtcggcttttattgcctggggagtgcgttatacagtcgaaccaagttcgccctgctgcaccccgtgctgctcggtttcgtggcgatgatcctttatctgaaacttttcggtatcggttacgagcattaccgtcgttcgaccgagttgctcaatttcggactgggactttcggtcgtggctctgggttatctgatgtacgaacaactcgagcatatgcggggacggttgcttccgattctcgtgtcggtcgtcgtcggctgcgtggtcggagttcttagtgtggtttatctggcgcgtatgctgggggcggatcggattttgcaaacttcgcttgctccgaaatccgtgacggtgccgatcgccgtatcggttgcggaaccgctcggcggcatcattacgatcacctcggtcgtcgtcttttgtgtcggtattttcggcagtctcgtcggtccctggctgcttcggcgttgcggggtcacggatcctatggcacagggattcgcgctggggtctgcggcgcatggcatcggaacggcccgtgcgatcgaaatcggtgcgctggaaggggcgctcagcggtttggctatggcactgatggggatcatgacggccctgctgctgccggtgatcgagaaattcctctactgattttttgtcttccggaaaaaggattacctttgcaaaaattttttcgggcggaagcgtaacgctcggatgcggcgatgtccgttccggacgcaatgcgcggtatgtttcgcgccattttattaaaatcaatggtatggattggctctactctttatttgtcggtggcgggatagcccacaccgtattcacgctcgcattggtgattaccgcaggtattctgttgggcaaagtcaaggtttgcggtatctcgctcggtatcacctggattttgttcgtcggcatcatcgccgcgcatttcggtatgggaatcccggccgaagtacgtcatttcatccaggagttcggtctgatcctttttgttttttcaatcggtatgcaggtcggcccgggtttcttcgcttcgttcaagcatggcgggctgacgctcgtctgcctggcttcgacgatcgttttgctcggggtaggcgtggcgtacgtgattcatttggtatcgggtacgccgattcccacgatggtcggcatcctttcgggtgcggtgaccaacacgccgggactgggtgcagcacagcaggcttatgcggacgcttcgggagtcgaagaccccagtattgccctgggctatgccgtagcttatccgctgggcgtgatcggtatcattttctcgatgatcttcatccgttatgctctgcgggtgaaattcgggaaggaggatgaggcgctcgctgcgatttccgcagaacacaagatggccgaaatcgtttcgatcgagtgtacgaacaagatgttgagcggacacgacatctcctatgtcaatgagttgatcaatcggaaattcgttatttcccggatcgctcatcccgacggtacgatcgtattggcggacagcaacagtattatttcgctcggggataaggtattggtcgtctgtgcatccgaagattgcgaagcggtgacggctttcatcggtaatcggatcgaaatgggggagaaggagtgggatacgccggattcgaagctggtttcgcgtcgtattctgattaccaagccggagatcaacggcaagactttcgccgatcttcgcttgagaacccgctacggcatcaacattacgcgtgtcaatcgtgccggagtcgatctgattccctatcagggaatgcagcttcagatcggcgatcgcgtgatggtcgtggggccggagaatgcgatcgagaaggtcgccgccgtattgggtaattcgctcaaaaaactccgtgagccgaatctggtgacgatcttcgtcggtatcgcgctcggtgttctgttgggttccattccgttgttgaacgtgccgcagcccgttaagctgggtttggcaggtggtccgttgatcgtggcgctgttgctcggccgcttcggtccccggttccatttggtgacctatactaccatgagtgccaacttgatgttgcgcgaagtgggcattgcgctcttcctggcggcagtcggtctgggagccggcgacgggttcatcgatgcgatcgttggcggcggttaccgctggatcggatacggtgcgcttattacggtgatcccgttgttgctggtcggtattttcgcccgcgcccggctaaagatgaattactatacgctcatgggacttatggccggtagtatgaccgatcctccggcactggcttatgccaacggcacggcaggcaacgatatgccggccttgagctattcgacggtttatcccgtcgtgatgttcctgcgggtgcttacagctcagatattcattctgttcgcgttgtagaactctacgacgcggccccggtcggggcttatgtaacaataccaactcccgcagtcgtgctgcgggagttgtcgcaaatattgcagaagggttgtaatcctgcatcggaaaatcgggccagttttttgatgggagggttaatttcgatattttcagctctattttccgtattttgctatctctaaattaaatgaaaaataacaaaattccaaattatttagggaaaaatagctaatcgtatatttcaataccctgacttgggttgccccggaattgaccgatatgcttcgaggaaaagtcgaaaatcggcccgagagagggttcgggtggaatttggcatcggataacgacccgcaggaccgagggttcctgctggaatcagcgagcagtcgttatatactttaatgtttttgggagcaggcaactccactctctccagagagggtttaggaaagaggccaaattataaacgaggtcgcaaggcgtaaataaacggccgtcggataagggatacattgaaaggtatttacttgccagtatagatacgattttgatttttttgggggaataaaacagcgctgtaatcggaagaaagattacagcgctgtttttaggaacaacaccccttgttcgggtgccgggacttgcaatgcggacattcggttttcgagcaacacgaacatccgacatcctctcgatgtcggacaatccgtacaatccagcggacgctgaatccgaggacgaggatgccgatccctattacagcgatattttgccagtccgtcatattataaccaggagaaaaggtgatacgtcagataagccattatccatgccaaagccgtattgtagagtaccgaaatacaggcccagcgccagccgatctctgcggcgatcgctacgatcgtggcgatacatggcaggtaaagcaggatgaagaccagaaaggcgaggaccgatgccggggtgaaatccccgcttgcgaccagccgctgggagagggtcggagagtcgagttcggcttccggggcgtcgccctgttccgaatagagcacgccgagcgtgctgacgacgatctctttggccggcaggcccgtgagaatggcgatgctggctttccagttcaggccgagcggttcgaatacgggcgaacatgcctggccgacctgtcccaggtaggagttttcataatgttcctccatagtttctgccggggcggctgcgtccggcgtcggataataactcaagaaccagaccgccaccgaagcgattagaatcagcccgcccatcttgcgcaagtattgcgcgcagcgatcccacatgtgcgacagcgtagcccgcattgtcgggacccgatagggcggcagctccatgacgaacggcgtttcgtccttcttgaacagataacggcgcatcagtcgggccgtgatgacggccacgacgattcccagcagatacagtccgagcatcacccaactggcgtaagcggcgaagaacgtgccgatcagcaggatatagatgggaatgcgggcgctgcacgacatgaaggggacgagcagtacggtgatgagccggctgctgcggctttcgatcgtgcgcgtggccatgatggccggtacgttgcagccgaaacccatgataagcggaatgaacgacttgccgtgcagccctatgcggtgcatgatccggtccatgatgaaggctgcgcgagccagatagcccgaatcctccatgaaagcgatgaacaggtataggatcatgatattcggcaggaagacgatgacgcttcccacgccgccgattacgccgtccacgagcaggtctttcaacgctccgtccggcatccaggcatccacgccctgaccgatcagtcccaccagttgctcgatccactcctggggataggctcccaggttgaacgtgcagtaaaacatcagccacatcaggaagaaaaagatcggaaagccccagagcttgtgggtcacgaaagcgtcgatgattttcgtcacttgtgtctgttccttctttcccggggtgtaggtttcccgcagagctccggagatgaatccgtatttctgatcggcaaaggccgtttcgatgtcttcatccagcaggttcttgatccgctgcgcttcccgtttgctcgcttcctcccattcggggtatttcgggtgatgcttcagttgatcctttatataactatcttcctcaagtagtttcattgcgatataacgcggcgggaattgcgggggcaactctccggattccttcaatgctcccgtgattgtccgcaggctctcctcgataaccggtccctggttgatgtgaatgtgacgcacacggtcgtcctcgttctcatagacggcgatcaccgtgtccagcagggcttcgataccccgtccatgacgggcgacgaccggcaccatcggcacacccagcattcgtcccagactgtcgtagtcgagttcggcgccgctcgcttccagctcgtcgtacatattgagcgctacgaccactcggggattcaggtcgatgagttcggtagtgaggtagaggttgcgttccaggttcgaagctacgacggcattgataattacgtccggcgtatgttccgccaaatggcggcgtacgtaaagttcctcgggcgagtaagccgtgagtgcgtaggtgcccggcaggtcggtgatttcgaaacgatagcctctgtaggtgcagtgtccccgtttggcgtccaccgtgacgccgctgtagttgccgacgtgttcgtgaccgcccgaaatagcgttgaacagtgaggttttgccgctgttcgggttacccaccagtgcgacgttgatccgctttgagctttgggcgatgacctcatggagctggtcgccttcgcgtgttccgttatattcttcgcttatcaggccttcggcctcttcgttggtgataactacgaccatgtgagcttcgctgcggcgcagcgaaacctcgtagtccatgattttgtaaacgatcgggtcgcgcaacggggcattgagaaccacttcgacttttttgccgcgtacgaaccccatttccataattcggcggcggaatccgccatgtccgagtactttgagaatcgtggccgactggcctgttttcaaatccgataaacgcatgttcttttgctgaaattacggggcaaagatagggaaatatttcaggaacggacatccccatatatggggataatccggctcagtacggtttttcaggctattttatggttgcgttgctttttgggggcgaaaaaattggaaattgaaatttttttatatctttgcgacatacatccaaattattatacgtattatgaaaaatttagttgaaaaaatcaatgccgaatacgaagtattcgtaagtaatgccaacgctcaggtagaaaaaggaaacaaggcagccggaacccgcgcacgcaaggccgctctggaattgagcaagctgatgaaggagttccggaaggtttccgtcgaagcttcgaaataagtttattacttttttgaaaatgaagggtcgcatgggatacatgcggccctttgttatgggtgtacaacttggcaattatatctttcgatgtactatccgattattcggcctgtgaccgtgtttgtaatgctcccccccctgtttgaggaaatttggcgtgctgcattcccataacaacatataatttatataattcttcactgttcgaacaggagcagaccgtaaccggcagaaaattcggtatgcgatacagaggaatctccggaatatcgaaaagattggcctgttttttagtagcttaaatcgataccgtgccggcggaaattttcgaggtcttcatccgacagaccggttttcgggaaaggaacggccaggttgtgatcgttcagatagcggcgcggtgcccggtagtcgaatgtcggactgaccaacgagtaggccggatcgatgaagtcgccttcgatcgaagcgatatcggccatgctttgaaacatggagtgggttgtggccggtgcggattcgttgttgcgggccgcttcgactttttccgggaattcccgtcgatattccggcgagaaccatcccagattggcgacatagagctgataaaaagtggtcgtaggggaggcgtgtaagaagcgctcccgttcgtcgtcgagaatatcttcgccgtgatcggcacagtagagcagcgccgaacagtcgttttcgagcgagcggagatattcgatcgtctgcgagaggaagtggtccgtatagtagatcgaattgtcgtaggcattgacgagtttctcgacgttctttcggttgatggccacgttatcgtccggcaggaagcgggcgaattcacgggggtatcgttggtgataggtgaaatgagagccgtaacagtgcaggatgatgagcaggtcgtgctccggatcttcggcgataacctgtttcatcgcttccagcagttgcatatcgtaacgtggctccggaaggtacaccaggctgtctgcatccttggccaacttgtcgatcatggctccctgggggcgctggttggaaagaaaccaggttttgaacccagcctccttgaagagtgccggaagccccttgcgacggtatagttcttcgtgttgatcggtttttaccgacgaaagaatcaagggcacgcttttgtgcgtggtattgctctgtgtgactgtattccggaatacgaccagaccctctgtgcgggtcagacagggattcgtttccctgtggtaaccgtacagttgccagttggcggcccgggatgcttctccgattacatagacgtaaatctcgcgtttggaagcctcggccgtgcgccgtgcatggtatgtgaaatcctccgaggtgtgttcgaaacggtacatcttgcggaactccgaaccgcaaagaccgatattatagaaaacattgaccggaaaaatgtcggttttcaatacccgcttgtcttcgctcactttataggccggggccaggaacaaccctccgagaatgaaggacgagagtccgatcagggcgatattcttgcgggctgttttcgaaagacagtgcctttgtccgatgtcgcgtgaggcgaaccagagtagcggcagatagatggcgcagacgatgatgatcgatggatagatgttcgagagcagctcgccagcctcttccggattggtcgtcagcaggttggtgaacatatccgttgcgatgatcgaattgccgaacaggtagagcagtacgatttggaaggcggcgaggacgacgagcggaaaggccagccagatcatgatgccggagcgtttcagcacggcgctccacatcaggtagaaacccatcgggataaagagcgatgcttcggccgaccagatggagtacggctccgtatatagtaatacgaggttggggataagcagcgtgagaacgaagtagaacgccagcaggatggaccctctgtcgttatgctccttgaaactctcttttttttcgtgaactgccatatctttcagaacgcttcgttgatattgaacaggaatccgctcgtgtgcttgccgaatccgtaatctactcggatattgatccgttttttgaattcccaccgcaggcctatgccgtagttggggagggtgtacccccatttgaacttttcgaacgagggaaatacgttacccgcaccgccccatacgacacagccgatacgtcgccagatattctgccggagttcgacctggagggtaatcatatcgttgtcgttgtattgtccttcgtagtagccgcgcatacgcttcgaaccacccaggcgggctttcatcagccagggtgtgcccgaggcattgaattcgccgtacagctcggtggctacgataccgcctttccatacccgatgataactgttcgccgtgaatatcgcctgccagagcgatttggcgttcgacccgagaaaatccggccgccaggttcccttcagacttaaataaagtcccttgtagggatttggaatgaaatcccttgtatcgtactccacgatcgcaccgatgcccgtagtcgtgttctccgggttttggccctcgatatattccggccgggtgaacttgatgccccggctgttgcggaaattgacagaggcgccgatgaacatattgggtacgacctgatagaggtatcttacgtccacatcgtagcgtttttcgacgtacgaccctttgggattattcgctccggccgaatagccgataccccagtagtcggtcggctgcgagtagaaggagagcttgtacgaaattcggtggcgattgtggctgaatatgttgttaccgttgattcccaccatgtagaatcctgtcgtaccgcccgtgatgaatgccgtgatgtccgacggcggtgtcagtgaatccgtgcggtcaaggcggtaaagacctgcagccataaccgcgaggctgaattgagtgtctttcgaataactcggccctccgatgaaggtgaagtcgatctttttttcgaaagttttgtccgtgctcgactctccgaagtaatcgataagccgccgccagaacgattttttcttcggggcggcggccagggtgtccgacggctgtgatgcagggatcgaatccgtctgcaacggggtgtaactataccgaatcgtatcgttttctccgatatacaccttattatcttgtgcatacagaggcgatgcgaagagtagcaatccgcaaaagaccgtcaggaatttcgacatggagaagtcttatctgtacttctgtacgacttgataaaactcttttttatcggcatcggagagaggacccttgcgcataaacaccaggtcgccctccttgctgaccagcagcaggacgaacatattgttgcagtcgcccaattgccaggcatcgcgcagggtattgttttgatcggccagtaccgtagcgccgttggaggctgtgcgtttgcgagccatgttgcgagccataccgttgggaatcatcggagcgtctttcaggttcattaccccgaaaccgaacaggttttcgccttccacccggtgattttcctccatatccgttgtgaaatcctcgttctgtttgtggtggtcggggtcgatatagaagatcatcaggtttttctcaccccagtaagggagctgcgtagggtcgccgttcagatcgagtaacgtaacgtcggataccttgcggggaagagacgactgtgcggatacggcaaccgacataccaagcaacggcagtaaaagaagccatagtttcagtttcatacttattacattttaggagattggtaggcgcaaagatacgaaattatttttttgttgaatcttctattcgtcgggaagagttgcgggttcgttgagacttcgctcttttggccgaagccagggcgtcgagcgaatagactccgccgcccgaaattaccagggctacctggattcccagatagacgaacagcagttcggaggttccgaatcctttgccggggaagaggaataacagcgagatgagcagactggcggccatgatcgcggcggacaggcggactttgtagcccagcatgagcgaaatggcgcacaacacttcgatcgtggcgatcgcaacgaaaatgaaagcgctgccgaatattccccacgacgggtaatagttgataatttcattgtaggcctgcattttgcctacgttatgcaggagaatgatcgtaccgatgaacagacgcagatagagaatcgcccaatcggctcctttgtggcttttgaaccaggtttgcagtttattttccatatgtataactaattccgattgaaaaaatacaagcaattcgtattccaaaaaatcattttgtgtgttcagcgcaggtaattctgcctgatcggatgatttttcggtgtttttgaggagaaaaatcccgagtgggacagcgagtcgaatatcgcgggttttcgatgtttgcggatcgagggataaatacgatccataacaggggtgtggtcgagccgcaaagagtcttttcattccgaacgacagagagtcgggaaatccgtaattcgggttatagattccgtaattcatatactgaccggcaagtggggcctgtgtaactttgccttgtaaaaaatatgaatcgtatgaatatattggaaagaatgagggcgggggaattgattttcgataccgaccctgaatatccgtcgctctatgcagaattcgagaagacgatgaagttggtggctcaactcaatagcggttaccatacaccggaagagataagggatctgctcggccgtatttggggacagccattggacgaatcggtacgtatgtttccgccgttctataccaacttcggtaagtttacccgtgtcggcaggggtgtgttcataaatttcggttgtaccttcctcgaccggggcggtattacactggaagacggtgtgttcatagggccgggagtgctgctcgttactgaaaaccacccggagcaaccggccgttcggcgtaacgtatatgccaaacccattgtcgtcgggcacggtgtctggataggtgcgggagctgtcatattgcccggcgtgacgatcggcgagcatgccgtcgtgggagccggagccatcgtaaccaaggacgtgcctgccggggtaatcgtggccggcaatccggctcgtatcgtgagaagtataaaaacggaataaaattaagttttatgaaaatcggaataattgcggcggcattggcgtttgtcggtctttccgccgttgcacagacaaaccaaaaaacgaatatggatatgaaaaagttggaactggtacaggagtgggataagacgttcccgaagagcgacaaggtcgagcatagcaaggtggttttcgtaaatcgcttcggtgtaacgctcgccgccgatatgtatgtcccaaaagaggttgtcggcaagttgtcggccgtcgccgtaagtggaccgttcggagccgtgaaggaacaatcgtcggggctttatgcacaggcgcttgccgaacgcggtttccttaccatcgctttcgatccgtcgttcacgggggagagcggcggtgtgccccgcaacgtggcttcgcccgacatcaatacggaagatttcagcgcagcggtcgattttctcgccaacgaagaccgcgtggatccggaacgtatcgggatcctcggtatatgcggctggggtggttttgccatcaacgctgccgctaacgacacgcgcatcaaggttaccgtcgcatctactatgtacgatatcagccgttgtacggccaacggatatttcgaccaggcggacaacgccgacgcacgttatgagatgcgccgccggctcaatgcccagcgcaccgaagattatcggaacggttcgtatgtccgtgcaggaggggtggtcgatccggttccggccgatgcgccgcagtttgtacgcgattatcatgcttattacaaaacttcccgaggttatcacgcccgttcgctcaattccacgcaggggtggaatgcgacctccaacctcgcttttttgaatgcacctatccttgcctatgccgcagagattcgcagtgcagtgatggtggtacacggtgagaaggctcattctcgctatatgggagaggacgctttcaagaaattgcaaggcgacaacaaacgattgctcatcgtacccggtgccaatcataccgacctttacgacaagatggagataatcccgttcgacgaaatagcagcattttatcgggagtatttgaagtaagcgtagcgctcgatagatacaatagtaaaagcctgcgatctgttcgcaggcttttcatatttcggttacgcatgtaaatacttcgcctcggcaaaatgcaaataaaatttgcttttgcgctcggcttaatcgtatctttgcacaattgttgagcgtatcgattgtaaaatgcctgtgagctgatttttttttgtgattataatttgttgattatgagtgataagtataagatactgttcgtttgcctcggaaatatctgccgctctccggcggccgaaggcatcttccggcaaatggtcgaaaaacggggactgggggagaagttggaggcggattccgccggaacctatgccggacacaccggcgaacaacccgattcccgcatgcggaatgcggcctatgcccgggggtatctgctgacgcaccgggcccggcaggtgcggttgcgggatttcgaggagttcgatcgcatcgtggcgatggacgacaccaattaccacaatctttatcgtctggccccttcccgtgaagcgggaaaccgtatttacaggatgtccgaatttttccgggaacatccgaactggacccatgtgccagacccctactacgaagggcatgaagggttcgagctggtgctcgatatgctcgaggacggctgccgcacgctgctcgacgagttggagaagaggtagctcgaaatcgcagagaacgaaaaagagtgcatttttcaatgcactctttttcgtcgaatcgagtctgtatgccggtgcgatccggaatatttggtccgtcgaacgtccgaatcagaagtaaagtccaactcccacctggtaggtgttgcgccaagggcacttcttggcggcgaacaggtaggagaaatcgagctccagatgcatgaaccgcagtcccgcaccgattgtaccgtagtcgtatccgtggctgtcggcgacgtggtagccgccgcggacagcgatcatctgcatcagcacatactccacgccgatgcccatcccgaaggacttgttctccgaggaagagtagcggtagcccagatcgaccgaagcttcgagcgaatgggaatcccggatcggggcgaagagcgaaccgccgacactgaatttggtgggcaggtcgtaattcgaatcgtcgaacgtgaagccgaagtcggagattttcgcacccgcactcacccaggcgccttcgagcatccggttaagcggaatccgcgcgtatgccgcgacatcgaacccgagggcgttgttcgtgaacagttctccgtacgaggagcggatgtagcgggccgtcaccgacagacccagatagcggccgatccgatagctgtaggccagatccgccgaaacgctgagcggccggaacgcttcgatgccgacgattgggttattattctcgtctttgggaatgaaagggtagtcctcgtcgtccggactgagcttcggctcccggtaaaaacgggtgccgaacgagatcgaatgtttgtggttgaaggagtagaatccgccgaaggccatcaggtcgtagccctttttcacgtcgcgcatccagggcgagtaggagaatcccacctcgaacaggttgtggctgaagagcgacgaggccgcgttctggaatacggagtaagctccgccggtagtcgctaccgaagcgttggccatacccgctgtgcggacatcggggttgatcgtcaggaactcctgagccgatgccgccgctgtgcccgacaggaggattattgcgagaatgaagatctttttcataatttgtaacgtctgtttttagcgtttgactatggtgcgggtaatttgaatgccgttgtaggttacttgtaccagataggttcccgaagcgagtcccgatacgtcgagtttgacaggttcctcgttgataagtccaagtgttatgttcattacctccgttcccattgagttacggatacggatcgtgctttctcccgagtagttcggcagtatgttcagtacgtcggtacatgggttggggtaaaagtccattgaaataccggtcggattgtctcccttgctaacggtataggcaatggttcgttttgctgtctttgttccgttcatagccagcaattctgccgtatagcttcctgctgcgtattgtgatgcgtcgatagtcagcgtgactacgttaccgtcgatcgacttcgcgatcttgcccgaggggtcgtccagacgccattccgtgtagccggccagcgtatattgcagcgttttccgttcggaggcgccgagcgtgaaggtgtcgttctgtcctgtggctggcgtgatcgtcggctggtcggaaacgggcggcacctcgcccgaatccagggctgcacccgcatcgacgagcttgccgatttttccggcataggtaccccgaccattgtatattggtccctgatagctgtcgatgtcgcgtgctgtcgagaaaagcttctctttgagctgttcgttcgtgaatcctggtgccccgaattgcgaaacgatcagggccgcaacacccgatacgtgggggcaggccatcgaggtcccctgcatgtagccatacccgagagtctccgagacgtagtcgatcgtgtgggtctccacctctcctctgaaatttgtatagacgaaagtcatcccgttttgcaggtcggtcggaagcgtgctcaggttataaccttcgttataatggataggcctggaaaaatcggctgcgtctcctccgcccggcgcacatatatcgacggtcggaccatagttggtgtaccaagcggcttcataagtgcaggagacggcggccacactgatgcaaggctcgtaagcggccggatatccgggctgtccgctgttttcattacctgccgcgaatatcacgacgccacccgccatagggccggtctgcgtctgtccgtcgggcgacatgcccgcatattgaataaagtagtcgatcgcctccttgaccgcccgatcctggttgatccactggtccagagacatggagccggccgcgtatccccaactgttctgacaaattacagcgccgttgtctgccgcatatttgatggcgtcggccgtcgcgttcgagctggcatcgtaacgtccgtccgtcgggtggaagatctggcaggtcatgatcttcacgccgtcgccgcttccggttccgcctgccatgccggagattccgacatcgttgttgttcaccgcagcaatcgtaccggctacgtgcgttccgtgtccttggccccaggtgatgtcttcattgtatccgctgcaaaaattcttaccgatcccgctccacatattggctgccaggtcggggtgggtgtattccacgccctcatccaatacggcgacgattacatcgctgcgacccgccgtcttcttccatgcaggaatcacgttgatgtctgcaccggcgacggcttcctcagaaaccgatccgtcgttgtaaagcggccattgctctgcgaagagcggatcgttgaaagggtagttcgccggaacggccttcggcagggccatcagttttcgccatggagtcccgctccttcggcccacatccccgactttagtgattttgcgcggaatttcgacatgattcacgccggcaatctctccgaagtcttcggcgacctgctcggcagatcctttgaaacgaatgacataccacaggtcgagccctgccttgcgtgttcgctcggcgcagccgttgtcggcgaacaaccgctccataccggtcacctcgtaccgtttgcaaagttcatcgaaagagatgttgcctgtcaggaccctgccgctgcgggtgcgggtcacgttcagcgcttcggccgtttcccggtcgagcttcatgcggatcactccttcgaccctatcggtatcccgtgccggagcactttctgtgtcgggatctttctggcaaccggcgagcagcgccagacaaaaaacgaaaagtagatttttcagcttcataagtgtatgtttttttagaaaaaaggagggaagccgactctcgtcaacctccctttcttgtatgaaatcgcagagagattaacagttcatcgctccgcagcaatgaattacctgtccgctcacgtaagaggagaggtcggaggcaaggaacagagccaccttcgccacatcctcgggtgtaccgccgcggcgcagcggaatttgctggtaccagccctgttttacctcttcgggcagggcgttggtcatttcggtaatgatgaagccgggagcgatggcgttggcacggatgccgcgcggtcccatctccttggcgatggacttcgcaagtccgatcataccggctttcgaagccgaatagttgcactgtccggcattgccgctgacacccaccacggacgacatattgatgatcgaaccgctgcgctggcgcgccatgatcggcgtaacggcgtgaatgaagttgaaagccgatttcagattgacgttcagcacggcgtcccactgcgcttcgctcatgcgcatcatcagtccgtctttggtgatgccggcattattgaccagaatgtcgatgcggccgaaatcctgcatgatctggtcgatcactttgtgcgtatcttcaaagttggcggcgttcgaggcgtatcctttggcttttacgcccagggcgttcagctcctcctccgtcttcttgccgttttcgtcgatcgccagatcggtgaacgcgacgttggctccctcttttgcaaactgaatggcgatcgctttgccgatgcccctggctgcgccggttacgacggccacttttccttcgagtaatttcatcttgctgaaatgtttttttgatggttaatttttcgttttatccgtaatattcgatctttctgtcggaaatccggcccgcgtcggctgcccgtatcgcaaaggtgcccgttccgaagaaaaatgttccgtttgtcggatgcgtcgtatttttctgtcgccaaatatacaaaaaatatttagaaatatttagtttttgtagtttcgtaaaatgttactacctttggaatccgaaaaaaactcttaataaaccatatatcgatcatgaagagagattctcaagtattcgacctcatttctgaggaacggaaccgtcagatgcacggcatcgagctgatcgcgtctgaaaattttgtcagcgacgaggtgatggaggccatgggctccgtactgaccaacaagtatgcggagggttatcctgccgcacgttactacggcggttgtcaggtggtggataaggtcgagaaccttgccatcgaacgtgtttgcaaactgtacggcgccgagtacgccaacgtacagccccactccggcgcacaggccaacatggccgttttcttcgccgtgctgaaacccggcgatacgttcatgggcctcgatctggcgcacggcggccacctttcgcacggttcgccggtgaatatgtcgggtacctatttcaaagccatcggttaccagctcgatccgaagaccgagcgcgtggattacgacgatatggagcgcaaggctctggagcacaaacccaagctgatcgtcggcggtgcttcggcttattcgcgtgagtgggactacaagcgtatgcgcgagatcgcggacaaagtaggcgccatcctgctgatcgacatggctcacacggccggtctgatcgctgccggtctgctcgagaatccggttaagtatgctcacatcgtgacttctaccacccataagaccctgcgcggtccccgtggcggtattatcctgatgggcaaagatttcgagaatccctggggactcaagactccgaagggcgtgaccaagatgatgtcgcagatcctcaattcggccgtattccccggtatccagggcggtccgctggagcacgtgatcgcagccaaggcagtcgctttcggcgaagcgctggatcccagctacaaggagtaccagaagcaggtgcagaagaacgccaaggcgatggccgaggccttcaccaagcgcggttacaagatcgtttccgagggtacggacaaccacctgatgctcgtcgatcttcgcacgaagttccccgaactgaccggtaagctggccgagaagtgcctggttgccgccgacatcaccaccaacaagaacatggtgccgttcgacagtcgttcgccgttccagacttcgggtctgcgtttcggtactccggctatcaccacgcgtggtctgaaggaggacaagatggaggagatcgtagcgctgatcgaccgtgtattgagcgatcccgagaacgaggcgaacatcgccgccgttcgcaaggaggtcaacgctatgatggctaactatccgctcttcgcatggtagcataatatgaagcaggtagtagaatttctcacgctcctgcacgaaaacaacgacaaggcctggtttgactctcacaaggagatgtacaaacgggccttgtcctgtttcgaggtgtttacggcgaagctgatcgacggcatcgccgctttcgatccgtccgtgcgcggacttacggtcaaggactgcacgtggcgcatctaccgcgacacccgcttcagccccgacaagacaccgtacaagacccacatgggggctttcgttgctccccgtggcaagaaaggcggttattcgggctactatttccacgtcgaaccggtgtgggacgaacgctcctggtcgcaggggcatcagctcactacggggctttactgtccgctgccggaagtgctgcgcagcgtgcgggacgagatcctggacaatggcgcggaaattgaagcagccatccgtgaggcgaaaggattcgttctcgacgagtcgaacaaactcaagcgtctgccgaaagggtatgcccccggcagtccgtacgacgaatggctgaaactcaaggatgtctatatcaccgaacgcctcgcgccggagtttatgttggacaaggagttattgaagaacacgctgcacgaatttcgtaagacgaaacatttttcggatattctgaaccgtgctgtgcagttcgcatacgacgaaatgatttgataattattactttatccgacggtcgcagtatcgaaccgaagacgtgcttatctgcggttcatggccttgtccgtaaggcagactctcacccgaatcctcttttcggagggaacttggatcgttacattcccgacaggtgcaccgaaggatatgactacgtttaattttagaaaatatgaaaaaagcaatttacctcttgttggtttcgatgctgttcgttactgcttgtacggagcaggcgccccggattgccaaatatacggatctctatgccgtaaagggtacggacagcctcttcctggatcgctatacggccgtttcggtcgagcaggacgatgcccggccctgtctggtcttcgttttcggcggcggcttcatcgctggggagcgcgatgcggagcggtaccttccgttctttcattacatggttaatcaggggtacgacgtggtatcgatcgactatcgtcttggtctgaagcaggtcgtcgcttcgggggacctctcgcccgaaaatatgatgctcggtatggcccggacgatctcgatggctgtcgaggatctttacgacgctaccgcttttatcgtggacaaggcagacgagtggggtatcgactcctcgcagatcgtggcctgcgggtcgagtgcgggagcgatcaccgtgttgcacggcgaatacgccctctgcaacgcttcgccgctggtgcaacacctgcctgccggcttccgctacgcgggtatcgtttctttcgccggggcgatcttcgaaatgggcgaggagctccgctgggcatcgcagcctgcgccgatgatgctttttcacggcgatgcggatgcgaacgtaccgtataatgtgattcgcgagagcggcgtcggtttcttcggctcgaagtacatcgccggacagctccgcgcgatgaactccccgtattatttctattcggtcgagaacgcctcacacgtcatcgccacggcgccgatggacggcaaccgggatgcgatcgatgctttcctctcgaaactcgtcgtggataaggaaccgctgatgatcgaaaccgacgaaacgacgatcggcgcccctgaagtccgcaagaacttcacgttggccgaatacatcgcatcgaatttcctgtaaaaaggatgcggaagtgtgtgcttacggttcgaatcggcctcgatttatgccggctggacaatgatgcgatgtgtccgatgagtatgctcggtgatggttcggcgacggattgctgtcgagaatattccgtatggagtttccgctgctgttcagattgcgggtagagtcgggaatagatcggcgaacgcaccttccgaaatcatcaataatataaaatcagccgcaacctaaaggttgcggctgattcttgttgtatcggtcttgtcattactccaccgttaccgacttggccaggttgcggggctggtccacgtcgcgccctttattgacagcgatatgatacgccagcaactgcaacggcaccgataccacgatcggcatcaggcactccgccacgacgggcacttcgataaagtagtcggagctcttgcgtacctgctcgtcgcccttggcgatcacggtgataaccttgccgccccgggccttgatctcctcgatgttgctggcggtcttttcgtaggtgtgatccggcgtcgcgatggcgatggtcggcatctcggcgtcgatcagggcgatcggaccgtgtttcatttcggcggcagggtagccctctgcgtggatgtaggagatctccttgagtttgagcgcaccttccagcgccgtggggtagttgtacccgcgtcccaggtagatgaagttgtgcgcgtaggtgaagattttcgagaagtcggcgatccggtcgttcaggcggagcacctcttccaacacggcgggcagatcgagcagatgcttggcgatcttgcgcgagcactcctggtcgatcgtacccttgacgcgggcgatcatcagcgccagcatcgtgagtaccgttacctgtcccgtgaaggctttggtcgaagccacgccgatctcaggccctacgtggatgtaagtgccggaatcggtagcccgggcgatcgacgagccgatcacgttgcagatgccatagacgaacgcaccgttctgcttggccagctcgatagcggccagcgtgtcggccgtttcgcccgactgcgatacggcgatcacgatgtcgtcgggataaatcaccggattgcggtaacggaactccgaagcgtattccacttcgaccggaatgcggcagaaatcctcgatcaggtactccccgatgagcgatgcgtgccacgaggtgccgcaagccacgaagatgatgcgccgggcgttgagaaaccgctctcggttgtccatgatgcccgacaggatcacgtcgtacgtctcggggttgatccggccccgaatgcagtccacgatggtcttgggctgctcgaagatctccttgagcatgaagtgcggatagccgcccttttcgatctgggagatgctgagctgcaacttcttgatgtcgatcttgctctcctggttgtcgagcgttacgatcttcagcgggtggttgcgatccatgaccactacctcgccgtcattgacatagacgatcttgtccgtatattccacgatcgacgccgcgtccgatgccaggaaaaactccttgtcgccgataccgatgaccatcgggctgctgcggcgtgccgcgatgatttgatcttggttgcccttctccactacggcgatagcgtatgcgccgatcacctgcttcaatgcttgctggacggcctccagcaacgtgcagttgttcgacgtacggatgtattcgatcagattgaccagtacctccgtgtcagtgtcgctcttgaatgtgtaaccgttttcgatcagcgcctctttcaacacccggtaattttcgatgataccattgtggatcagggcgatattgcccgaatcggagtagtgaggatgggcgttgatgtcgttcggttcgccgtgtgtcgcccaacgggtgtgggcgatgccgatcgttccgtccagatccttggattcgacgaaatgttccaaatcggcgactttgcccttgcttttgaacacgttcagaactccttcccgattgaccagtgcgagtcctgcgctgtcgtaaccgcgatattccaagcggtgaagtccttttatcagaatggggtaagcctgccgtttacccacgtaacctacaattccacacataatgtattctttttgcgatttgcaaagatagtgaaagccgggagaaaacgggaatttgttctcaattttccaaggcgcatcctatctaaaactatgtcaaagatagtgaaagggaagagcaatcgtgcgaacttgcacgcaaagattgctgaaccgaatcctattttctattataaaaatagtgcaaggtgagtgagagccaaactaaactttctgttttcctactccttgcatcgtagagttcacaagtgccctccgcgtatgcttcgagcgtgggttgtttgaactcgttcgaacctttccatcttctttttttgtaaagatacgaatgagccgggcgcaaaagcaaattttatttgcattttgccgaggcgaagtatctacaacgaaatcaaagatcctatctttttgaacaaacgtatccgtaatatacgaaaaacgggatatatccttcggatattgtcccgtttttgaaatcgtattgcttgtttacttttcagcgaaatatttataaaacagcggaatcgtttcgacccccttgtagaactggtcgagtccgtagctctcgttgggcgaatggatggcgtcctccgccaggccgaatccgatcaggagggacttgattcccaagatattttcgaatccgctgatgatcggaatcgatccgcccgaatagaacggcaggggtttcttgccgaacgtgtcggcgatggccttttccgccgctttgtaagccggcatatcggtcggagccacgtagggcataccgccgtgcaggaacttgaccttcaccttgacgctcttgggagcgatcgccttgaaatgtttctcgaagagcttggcgatctttttgaaatcctgtccgggaaccagacgcatcgagattttggccgaagccttcgacgggatcaccgttttggtcccctcctcgatatagccgccccagatgccgttcacgtcgagtgaggggcggatgcccgtgcgttcgatggtcgtaaagcccgcttcgccctcgacatcgccgatttcgagcgctttcttgtattctgtaaggttgaacggagccttgttgaaagctttgcgctcggcggccgtcagctcgcgcacgtcgtcgtagaagcccggaatcgtcacgtgtccgttttcatcgatgagcgaagctaccatgcgggccaagacattggctggattggccaccgcacctccgaacaagccggagtgcaggtccttgttgggtcctgtcacttcgacttccatataagtcagaccgcgcagaccgcaggtgatcgaaggtatctgcatcgagatcatcgatgtatcggaaaccaaaatgatgtctgccttgagcatcttcttgttgtcggcgcagaacttgtagagactgggcgatccgatctcttcctcgccttcgagcaggaatttcacattgcagggcaggctgtcggtcgcgcacatcgcttcgaacgccttggcgtgcatgaaaagctggcctttgtcgtcgtccgcaccccggcaccagatgcgcccgtccttcacgaccggttcgaacggcgaggtgcgccattcgtccaccggatcgaccggcatcacgtcgtagtggccgtacaccaatacggtcttggctttggaatcgacgatccgttcggcgaaaacaaccggattgccttccgtgggaagtacttcggcatggtcggcaccggccttcatcagcgaagcggccagccattcggcgcaccgggtcatatcgggtttatgatcggattgagcgctgatcgaagggatgcgcaacagctcgaataattcgttgagaaaacggtctttgttcttctctatgtaactctttactttatccatggaatttgattatttggtgagtacgtattggtctgcgagttctccggtgataggctgcttctttgcattaagacggcgcaggcggttttcctctaccttgtagtactcgggggcgggaagccctatgcctactttggcacgcagcgtcagcaggttgccttttaccgtatagtttcctgtctgttgaatcggctcttcagaacgatccatatagctggaattcatcgtataggtgttgtcgttgtgaagcgtgagttcaatctcgatgcccgggcagtccgcagcaggaaaaacccctttgtaagttccctggtagtcgagtgcgttttcggcattgtgcatgtcgggtaccccggtagtcgtcttttggcgggagtttcctccgcaggctgtcagcataattgcggcagcgagtatcaataaaatgtttttcatcgatttatatattacaaatttgttttatttccgcaatgatccgccgggccagcgcatcggcctctgccatcgttttcgcttcggtatatacgcggatgatcggttccgtattcgatttgcgcaagtgtacccaattctccgggaaatcgattttaacaccgtccgtatcgttcaccttttcattggcataacgggatttcatttcacgcagtactttatccacgtcgatagccggtgtcagctcgatcttgttcttcgaggcgaaataggccggataggtcttgcgcagctcggtcatggtcatacctttttcggccagataggtcaggaaaagcgcggcgccgaccagtgcgtcgcggccgtaatgcagttcggggtagatgactccgccgttgccctcgccgccgatgacggccccgacctctttcatcttagcgactacattgacttctcctaccgccgatgcaaaatattcgcctccgtgtatttgcgttacatcgcttaaagctctcgaagagctcagattcgacaccgtattgccggttttgcgggagaggatataatccgccacggcgaccaatgtgtattcttcgacaaacatcgagccgtcttcgctgacgaaggccagccggtccacatcgggatcgaccactacgcccagatcggcctgttcgcggacgatcgccttcgatatttcggtcaggttctcgggcagcggttccgggttatgggcgaactctccggtcggttcgcagttgagctccacgacttcgcatcccagctcccgcagcagcttgggtatgacgatgccgccgacggagttcaccgcatccacgaccaccttgaagcgccgcctccgcacggcttccgcatcgaccagcggcagggccagcacccggcggatatgctcgtcgttgtaagactcccgcgaaacgaccttgccgatatggtccacatccgggaaaacgaaactctcgtcttcggccagcgccagcacccgcttgccctcggcgtcgctcagaaattctccctcggcattcaggagcttcagggcgttccattggcgggggttgtgcgatgcggtgatgatgatgccgccgtcggcccggtgcgccgtaacggccagttcggttcccggcgtagtgcagagtccgatgttcactacgtccgcgccgcaacccagcagcgtgccttcgatgatgtcgccgaccatttcgcccgaaatacgggcgtcgcggcccacgacgattttgagccttttcccgggtgcggattcggcgatgaaacgcacgtaggcggtggtgaatttaacgatatcgagcggggtgaggttctccgtcgcagggccgccgatcgtcccccggatgccggaaatggatttgatgagagtcatgtcgcaatatctcttttcttgtattccgccgagcgggatacaatatatttatgtaaaatttatcgtggcgtattttttgaaattcgaggtaaatgtagtacttttatgccaattatgaaaatataaaaaccgacactatgagaaccataccttcttccgaattgataatcaacgacgacggatcgattttccacctgcacctcaagccggagcagcttgccgacatcgtaattctcgtgggggatcccggccgtgtagccatggtagcttcctttttcgatacgcaggagtgcagcgtttccaaccgtgaattcaataccgtgacgggtacctacaaaggcaagcggatgaccgtgctttcgaccggtatcggcatcggcaatatcgacatttcggttacggagctcgatgcgctggccaacgtggatttcgccacgcggcaggagaaggcgcagaagcggcagctcacgctggtccgtttgggtacttcgggcgccattcagcccgacattaaagtggggcagttcgtcttcgcccgcacttcggtcggcttcgacggtctgttgaattactacaaggggcgcaacgaggtttgcgacctggagatcgaaaaggcttttatgaaacatacgggttggagcgatttgcttccgaagccctatttcatcgatgcggatccttcgctggccgagcttttccgcgacgtgaccatcgaaggcatcaccatcgccgctcccggcttctatgcgccgcagggacgctgggtgcgcctcgaaccggccgacatccatctgaacgagaagatcgagtcgttcgactatcacagacgccggatcaccaatttcgagatggaaagttctgctttggccgggctggccgctctcatgggccacaaagccgccacgatctgtacgatcatcgcccagcggatcgcgctggacgcctgcacggattataaacctttcgtcagaaagatgattcagacggcgctcgataaactggccacgctttagcgacagacaggcggcggccccgggcggagcagtccctcccgaaccgctcgtaatgaatcccgttgcactgtaacggagtccaaaccgaaaaatgattaatcaagataaattacaactgaaaaacctatgaaattttccgtatcaagttctgcattgctctctctcctggccacgaccggcaaagtaatcagcaataaaaatacattgcccatcctggattatttcctgatggagctcaagggggatgagctgcgggtgaccacttccgatctggaaaccacgctcgtgggctcgatccgcgtggacggcgtcgaaagcggaggcaccatcgcagctccggccaaactgatgctcgattcgctgaaggagttcgccgaaatgcctctgacgatcgaagtgaacgatcagaactgggagatccgtttgagttggaaaagcggttcgctctcgattcccggcgccagcgccgtgagctatccggcgatcccggctctttcggccgactgcaaggagctgacgctcgatgtggacgtgctggtgaacggcatcaacaagacgattttcgccacggccgacgacgagctgcgtcccgtgatgaacggcgtctatatcaacctggccccttcgatgcttacattcgtgggtaccgacgcccacaagctggtgaaatacgaggtggaaaccgctaatgaagtggcttcgtcgttcatcctgcccaagaagccggccaacctgctcaaatcggtgctgctcaaggaggaagacgcgatcaaggtgagcttcgattcgaaaaacgccatgttccagctcaagaaccatacgctggtgtgccgcctgatcgaaggcaactacccgaattacaacgcggtgattccggccgcgaatcccaataaggtgctcgtcgatcgtatcgaactggtcaacggcatcaagcgtgtggccgtctgctcgaaccccacgaccaacctgatccgcatggacatcgccgacaatcggatcaaccttacggcgcaggacatcgatttctcggtatcggccaacgaaacgatcagttgcagctacgaaggccagaatatcacgatcggtttcaaatcgacgttcctggtggaaatcctctccaacatcgatacgccgaccatcgtcatcgaattggccgattcgacccgtgccggcgtattcaaacccgtctatgacgacaagcagtcgagcgcgacgctcatgctgcttatgccgatgatgattaacgcataacccggatggagctcaatctcaagcggccgatcattttcttcgacttggaaacgaccggcatcgacatcgcacgggaccgcatcgtcgaaatatcgatggtcaaggttatgcccgacggcgaggagatcgtccgtacgcggcggatcaatccgggaatgccgattccggccgaagctacggccattcacggcattacggacgaagacgtgaaggattgcccgctttttccgcaaatcgccaagtcgttggcccagtttatcgagggatgcgacttcggcgggttcaattcgaaccgcttcgatctgccgatgctggtcgaggagttcatgcgggccggtgtggacgtggatttccgcaaacgtaaattcatcgacgtgcagaatatctttcacaaaatggagcagcggacgctggtggcggcctataagttctattgcggcaaggatctcgcggatgcccattcggccgaagccgatacgttggcgacgtacgaagtgctgaaagcccagttggaccgttacggggagttgcagaacgatgtcgcggctctggctgaattttccacgcgggcggaatccgccgactttgcaggacgcatcctctataacgaaaaaggggaagaggtcttcggattcggcaaatataagggccgttcggtcgcggaggttttccgcgtcgagccgagctattactcctggatgatgaacggcgatttcccgctctataccaagaaaattattaccgaaatccgctgccgggagaaaaacgagaaacaatagactatgctgaaggaactgtgttgtaccgcgatgttgctgacggccggggcgaacctttatgcccaggagccgcagtctatcgagaaatcgcagacgatcgtttatatcaacggtgcaaaatactatgtccacaacgtccggcacggggaaacactctattcgctggccaaaacctatggagtggcggaacaggtgatcgccgccgaaaatccgcagctcgctcaagggctcaaagccgaccagagccttaaaatcccggtcgtggaaacgggtgtcgtcgtacaggagcagctttctcctaaaaagctgaagaagaccttcgatcagcacacggtgcagaagggcgaaaccctttatgggatttcgaggcgctatgcgatctcggtcgaaaccatcatggaggacaatcccggcctggatccgattcacctgaaaccgggttcggtcattttgattcgcaaaaaggcggtcggcaagactgacgaagcggaaaacacggcggcatgggagcagtacaaggatcgtctgaacctggttgccgaggagggttatatgtatcacatcgtagctcccggggagacgatgtacgcgctgtcccgtcgcttcggtacgacggtcgaaaatctggagcggctgaacggtatctcggctcaagaactccgctcgggaagtatgctgaaagtccccggcgatgcaaagtccgcgaccgagccggtgcaggaagagcgattcggacagcccgagccaacggagagcgataccttgacgacggtcgaaccccaggtgaaagaggtggattttctggcattgagcagcggagagccgcttcgtgtggcgctgttgctgccgatgaccgatggcgacaaacagaatccgaattatctcgatttctaccagggatttctcctggggcttgaaaagataaagacccagtacggatactccgttcgggtcgatctgttcaatacccggcaggaaagcgaccgactccgtacgatcgtggacgacgccgattttcgggcggcccgtttgatcgtaggtccggtttacgaagaggaacttcctgccgtaatcgggtatgccgaggagtatgccgtgccggtcgtatcgcctctggccgatgtcaagaacgtcgatagcgatgttttgtttcagatggcaccgccccagatgcggaaatatgccaaaatcgaagaactgactcagggtgagcacaaacaggttaccttgatctacggagagaagaacgaccgggagttcgaacgggaaattctggctgcactgcagggtgtaccttacgcgcggcataattatcgttacgctgtcaaggagggcgaccaggggctttcgtcgctgctggccaatggcaaggacaacctgctgattgttttgagcgacagcgggctcgaagtggaccgtattctggcagccatcgcttcggccaataccaacctcgtagcccgcggcaagacgcctccccgtttcacgatcgtcggcaattcgcgttggaaccgcttcgggaacctcgatcgggcgctctacttcaaggaccggctcgtgctcttctcgacttatcacgccaaacgcgatgccgaggtaatcaagactttcgacagcgactacatcaaagctttcggggcgttgccgtcgctctactcttaccggggttacgatgcggcgatgatcttcgttccggcgatgtattccaacatccagtacgatatggagggacgccgctacacgccgctgcaaacctcttatacgttccagcaaatgcccggagggtccaaccatgtcaaccaaaactggatgcgtgtgagctaccgaccggacttcaccattaccgtagattgaaatggctttaatacccaacggaattcccgaaaaaacgatcgagcggctcagcgagtatcgccgtacgctgctcgcctgccatagggagggcattacccacattttttcgcacgtgctggccgggattcacggcattacggctgtgcaggtgcgtcgggatctgatgttgatcgggttctcgagcgataccaagaaaggctacgacgtaaaggtgttgatcgattttatcagcaacatcctcgacagcgaaagcccggtgaacatcgccgtaatcggtatgggtcacctggggcaggccatcaccaaatatttcaacgggaagagcctgaagctgcggatcacggtcgcgttcgacgtcgatcccgcaaaagtggatactgcgatcgacaacattccgtgctaccacatggagtgtttcgagaaggtcgtccaggagaacgacatctcgatcgtcatcgtatcttcgccgaccaaagtcgcccccgaactggtcgtgccgatcatcaacgccggcatcaagggcgtactcaactttacctcgacacgcctgaatttcccgcaaggtatctacgtggagaattacgatattacgactcttctggaaaaggttgcttactgcgtcaaggaatccgaagagaataacgacaataattaaggtgtcgatgcgagtattccacggcttcgaaaatctgccttcgttccgttcgccggcggctaccgtcggatcgtacgacggagttcatagcggacaccgggttttgctcgaccggattcgccgggaggcggccgctgtcgggggagaaagtatcgtgctgaccttcgacccgcatccccgcgtgacgctcggtacacaggagcggctgcggctgctgacttcgctcgaagagaagatatacctgctcgaccggttcggaatcgacaatctgatcgtgattccgttcgaccgggccttcagccggattccttccgagagtttcgtaaaggactatctgatcgggaaggtgggggtgaagaatctggtcgtcggtttcaaccaccgcttcggccacgacaaggagggagattaccggctgctcaacggattgcatgacgagttcggcttccgtgtgacggagatcgagaaacaggatgtcgatgccgagaaggtgagttcgacggtcattcgtcgtctgatcgagcggggagagatgaataaagctgcccggatgctgtcgcatccgtatctgttggcaggcgatgtggactgcgcaggacatatcgcctcgggagaggctctcaagctgcttccgcctccgggtgaatatcccgtgcggatcgaaggtaggcccggtgtgcttcggataaccgccaaaggtactccggaattattgaggacggcgggaaaaatgccgtcgggccatatactaatcgagttttaacgccatgctgacaagagatttcaaattcagagtctggtataaggataccgatcagatgggtatcgtacaccattcgaattacatctgctattacgaagcagcccgttcggagctgctccgcagtttcggctcttcgtatgccgatatggaggagaaggacggcgtgatgatgccgattctcgaagtacactccaagtacctgcgtccggctcattacgacgaattgatcacggttcgaatttccctccgggagttgccgaaagcgcgtattacgttcgaatacgaaatttacaacgaagcgggcgagctgctcaatacgggttctacggttctgggtttcatccaccgcgatacgcggcgtccctgccgggctccgaaaggatttatggagctgttggaaaaaaacctgtaattcacgctgtttttttacgaatcgccagtcgatcatttcggtttttcccaagaggaagatatttcggattttcgtcgatggagaaccccggatgggagttccgtacgattttatccgatataaaatagcggcggccccgaaaaggagccgccgcttcgatatacggtaatttactgctatttctcgatcagtgagatactgcgttggatgaactccgtcaggtttttgcccttgagtaatccgttggagagcaatgccaggtcgatgatctgtttgacgagcttgttctcgccgccgatttcgcgcaggcgcgtatcgcgctcgtcgcgcagggtaacgatcttcttcgaaagctcctcgcgcgtcgatttctcctcgggcgtgagttcctcctctttcttgcctttgaccacttcgtcgaaacggcgctcttcggcaaccgcagcatcgatctttttggtgatggtcttcagcttgtcgccgtagctcttctccacatcggccaggatgtcgatcacgatggggttgttgccattgacggcgatcgtgaagttatcgggcatctggctgtagaattggctcatacctccgccgctgatggctgccatctccttcatgcgccgcatgaattcgttctgcgtaatcaccacgggcgcagcatcggccgccatcgcttcgaacgaaatgttgtagtggatcttctcgtccttgggcatctggctttcgaatacgggacgcatgatctcctgctgggcctcgctcagggacatcttgagcgtttcgtctttctggatgagcttgtcgatcacgtcgctgtccacgcgcacgaagcgggcgtccttgtgtttcgactcgtaccaattgacatagtggttgtcgagttgtccgtccataaccagcacgtcataacctttggccttggccgattcgaggaacgaatttttctctacgggatcgtccacatagaggaaaacgaccgtaccgttcttgtcggtctggttgcctttgacgacctccttgtactcttcggcggtgaaatacttgccttcggtcgtcttccacagcatgaaactctctgccttctcggcgaacttttcgtcggtgataatgccgtattcgatgaagatcttcagatcgtcccatttctgttcgtagtccgcacgcatcgtcgtgaagagctcctgcaagcgatcggccaccttgcgggtgatgtagttcgaaatcttcttgacgttcgaatcgctctgcaggtagctgcgcgatacgttcagcggaatatccggcgagtcgatcacgccgtgcaacaaggtgaggtattccggtacgatcccctcgacctggtcggtcacatacacctgattggagtagagctggatcttgtttttctgaatttcgaagttgttccgaatcttcgggaagtagaggatacccgtcaggtggaacggataatcgatattcagatgaatcgagaagagcggctcttcacctatgggatagagttcgtggtagaactccttgtattgctcggcggtgatctcggtgggttttacggtccacagcggggcgatgttgttgatgatgttgtccttgtcggtatcgacgtatttgccgtctttccactccttcaccttgccgaaagcgatgggaacgggcaggaagcgacagtacttgcgcagcagttcttcgaccttcgaatcttcgccgtattcgagcgtatcggccgaaaggtgcagtacgatcgtggtcccccggtcgcgctgctcggccgtttcctccatttcgtattcgggcgatccttcgcaactccagtgtaccgtcttggcgccctccttgtaggagcgggtgaaaatctccactttgtcggcgaccatgaaagcggagtagaagcccagtccgaagtggccgatgatcgcctggttcttgtatttttccataaactcctcggcactcgagaaagcgatctggttgatgtaacgctccacctcatcggccgtcattccgataccgcggtcggttaccgtcagagtcttggcctccttgtccgccgaaacgcggatcgtcaggtcgcccaattcgccctttacgtcgcccatcgaagagagagccttgagtttctgcgtggcatccacggagttggagatcagctcacgcaggaagatttcgtggtccgaatagaggaactttttgataacggggaagatattctcggtggtaaccccgatttttccgtttttcatcgtatcatggtatttttttaattgaattatttatcgtttttttgatacagcggactttggttgccgctgccgaagagagccattctctcgcatggattcaacaaacggtgtgccacctcctccgatatgacattctgtcatacgcttcctgacaaaataaaggcggcagggaatcctccccgccgccgtgcctgtttcgtcggctcgtctgccgaaagtattagagcaatttttcgagtttctttaccaggtcggctttcgtgcaggcacccacctgtttgtccacgacctgtccgcccttgatgaacacgatcgtcggaatgttgcggaccatgaacttgcccacgatgtcgtcgttgttgtccacgtcgcatttgccgatgaccgcacggccttcgtattcgccggccagctcgtcgatgatcgggctgatcatgcggcagggaccgcaccattccgcccaaaagtcgatgactaccggaagctgggatgcggagatctcctcgaaattgtcttttgtgattgctaatgccataattttttagatgttttgattataagtattaaacgatagtatatttgatttcattgtcctcgaggaacgaaacgagattcgatgtgaggctcactttgtgtcgtttggagaacatattcacactcacctgcgcatcccggtcatagacattcacccgcagcgtggtcgatccttcggactctttgatgcggtgcgtcagctcctcgatcatttcgcgcgtgatgtcctcgatcgccagctggatgtacatctccttgatcatcgtgtcgcgcatttcggagagctgtaccatcgaagtgatcttgaattccagctctttgtcgttgtagggcttgggctggaccttgccccggatgaagaggaaatagtcgttgaacaagtatttgcggaaattttcgtagtccttgctgaaaagcgcgaattcgtgcgtgccgttgtagtcttcgagcgtgaattttccccagggcttgcccgtcttggtaacgaggttctgcgtggcgatcaccatccccgccacggcgatctcctgtccgcgcagggattccaggttgtccagatccgaaagctgcgtcttgcacatgttgcggataatcaccgcgtaatcgtccagcgggtgcgccgagaggtagagtccgatcatctcgcgctccttgcccagcgtttcgagcgtgctccagtcctgacaggccggaatcacgggatgctgaatatccacgaccccttcgccgcctccgaaaaggctttgctgggcattgtctttctcgctttggaaccgctgcccgtagcgtaccagctgctcgatgaaggtcgtcgaactggagtcgcgcagatcggtgccgaagaatttgcagcggtggaacccggagatcgagtcgaagccgccagcataggcgatgttttcgaggcatttgcggtttacggccgtataattcacccgttcgaagaaatcgtatatatccttgaatttgccgttcttgttccgctccgcgacgatgctctccacagccgcctcgccgacgcctttcaccgcagccaggccgaaccgcacgtcgccctccttgttcgaggagaagttgttgagcgattcgttgatatcgggcccgagcacccggatacccatgcgcttgcactcgttcatgtagagcgtaatctgcttgatgtccgaaaggttgcggctgagcagcgccgccatgaattcggaagggtagtgcgccttcagatagcccgtctgataggcgatgtaagcgtagcaggtcgagtgcgacttgttgaaggcataggatgcgaacgcttcccagtcgccccagatcttttcgcaaattttggcgtcgtgcccccgcttgctgcatccttcgatgaacttgggcttcatcttgtccagcaccgcacgttgttttttacccatcgccttgcggagcgtatcggcctcgccgccggtaaaaccggcgagcttctgcgagagcagcatgacttgttcctgataaaccgtaatgccgtaggtatcgctcaggtactcctccatatcggcgatgtcgtacgtcaccggctccagtccgtgcttgcgggcgatgaagttgggaatatactccatcggtcccgggcggtagagggcattcatggcgatcaggtcctcgaaacggttgggtttcaggttgcgcagatgttttttcataccgggggactcgaactggaacaggccggtcgtgtcgccacggctgaaaacctcgtaggtcggggcgtcgtccagcggaatgttgtcgatatccacctcgatgccgtgcacgtttttgacgttggttacggcatccttgatgatcgagagggtgcgcagtcccaggaagtccattttgatcaggccgacgctctcgacctctttgccctcgaactccacgacgttcagatcggcgtccttggcgatggccatcggagcgaaattctccaggtcgtcctgcccgatgattacaccgcaggcatgcacaccggtctgccgaattgagccttcgagcttttcggcgtatttgagcgtattgcggatcaactggttcggggattcccgttcggcggccagctccggcgactccttgtagcagaagtcgaaaggcgtttctccggccttcttgtcgggcgtaaccttgtcgggtaccagtttggccagccggtcgctctccgagagggccagcttctgcacgcgggccacgtcgcggatcgccagcttgggcgccatcgtaccgaacgtcacgatctgggccacgcgtttctgcccgtacttgtgcacgcagtaatgcagcacgtcgtcgcggccgtcctcgtcgaaatcgacatcgacatccggcagtgagatacgctcgggattcaggaaacgctcgaacagcaggtcgtatttcagcggatctatgttggtaattttcagacagtaggccacaaccgatccggctgccgaaccacggcccggtccgaccgacacgcccatttcgcgagccgcgcggatatagtcccatacgatgaggaagtaacccgggaatcccatccattcgatcgtactcaattcgtaccggatgcgtttctcgacctcttcgctcaattcggcgccatagcgcaggtgggctcctttgtaggtcaggtctttcaggtagcagaactgtttggccgtcatcagcttttcgctgcgctccttgctctcctccgcccaggcatcgagttcttcgacgctgtggcaggcatcgattcgcgccagctcttcctgatcttcgatcttcttgacgagcgattcgcgcaactcctcgaaaggcatgtggaactccggcggcggcgggaagttgggcatcagaggcgcatgggtgagtttgtactcctcgaccttgtcggcgatctcgagcgtggtggcgagtgcctcggggtggtcggggaagagctgcgccatctcctcgggcgatttcagatactcctggaacgtatagcgcatccggttgggatcgtccaggtcgcggccggtattgaggcagatcagatgatcgtgcgccacggcgtcttcggccagaatgaaatgcacgtcgttcgagcagatgtatttgactccgcatttggtcgacagctccagcagggccttattgaccagcaactgattctcgtacacgtcggcgtccttgcgcgggtcacccgacggatggagctgcaactccaggtaatagtcgtccccgaagacgctcttgaaccagcgcacgacctgttcagcctcctccatgtcgttgcgcatgatggcttggggaacttcgccgcccagacatgccgagcagcagatcaatccttcgtggtattgttccagcagtttcttgtcgatacggggcttgtaatagaatccttcggtaaaggagtaggagacgatcttgcagagattgtggtaacccgtgaggttcttggccagcagaatcaggtgatcgcccgccttctcgtccttgtccttttcgaagcggttgcgcacgacgtaggtttcgcatcccagaataggcttgatgcccgcatcggtggcgacgtcgtggaagttcttgacgccgtacatattgccgtggtcagtgatggccagagccttcataccgagggctttggctcgcttgatgagcggcgatatggccgctgcgccgtccagaatggaatattgcgtatgtacatgtaaatggacgaaatccggcataattcgaaaatttatggttttgggccgtcctttgcgaaggtacggaaaagtcgcgggcagatgcaaatttatctgcgtcttgccgatgcttaaggcgaagtcaaaggtagtgaaaaaatacgaaagaatttccgtatttccaggtaaaaattgcccgaacgattctacgctgttgaaaatgacgggataggaaatatgtggcaaaaatcttgcagcattccgaaaaaaaacgtatcttgtagatgaagggaacaaccggatttatccggtcctgcatcgcccgttttcgccgggcacgaacggagttcggaaccggaagcacggaagttcgaagaaccgaaaaacgacgggatgcgaagatttaataaaaatgtgattatcagtggacctcgttgggaatacggtactccgagttcccgcattttaggaaaggtctgaattttaatgcggccagaggatgcgaataaatgtccctcggattcgatgctgcaattgtcaaaaatggtacatcgaaagataaagatataatggccgaataaatatatcacctaaacagcgatgattatgaaagatgaaaaattagtcgtgttgagagagtggaactctgtcaccgaagccgaaatggccaaatcgattctggacggagccggaatcttttcgacgatccgcaacgaatatatgtcggcgatctatcctatcggtacgatgccggcacagctcgtggtcaaggaggaagatgcgaagcgggctgccgaattgctcgacaaaatgccgtaatttattattttgcagctattcaaggagttcgggaagctcttaaaggcccccgaattccttatgaacggctcggaacaacctctgttgcttgcgactttcgaacggttcggagaaggggcggaactgcgtaccgaaaacgtcgattcatagcttcgggtccggaaaacgaagtcgtcggaaatgaaaccggcttcgataagatcggtcgagccgtgtcggaggatctatcggttccagatggcccacgcagcttccgcctgccctacgagcatgtcgagtccgttgcacgtgtgtgctccccgttgcgctccgtattgcagaaacagcgtttcggccgggttgtagatcaggtcgaaaagatagtgggagggcgtgacgaaagcgtacggaatgcggggcgcctcttcgacattcggatgcatcccgactggggaggcattgataatgagccgatgcgaaccgattacttcatccgatacttcgtcgtacgtataatttcccgttgccggattccgcgatactagatcgaacggaatttccatctgtgccaatacatattgcacggcttgcgacgccccgcccgtgcccagtaccaatgcccgttcgggacgctccccgccgagaaatgtttcgagggaggcgcgaagtcccgtcacatccgtattataacccgtcagacgtctgccttcgcagcgcacgcaattgacggccccgatcatccgggtttccggcgaaagatcgtccagatagggtatgatctgttgtttatagggaatcgtgacattgaatccccgcagttcgggctgcgcttccagcaaagcgggcaactcctcgatcgttttcaattcgtaaaggtcgtaccggcaatccgcaatgccttcgcgtgcgaatttatcggcgaaataccgggctgaaaacgagtgtcccagcgggtagcctatcagaccgtagcgtttcataaggttttagttttggggagcggagattttttgagcgacccgcttgccgatgaattcgatgacatagatcagaagaaatcctgccagcgccagtgctacggcctgccacaagtgggcatcggtctgaccgatcgcctcgaaatgtcccggtgtaatgttttgttccaccaacgggtgaacggcaccctgggcatccgtataagtttccacgacctctttccagggccagactttattgagcgatccgaccatgaaacccatgagcagggagatcgtcaggtcgtgatgcttgcgcagcagccacgaaagcaggtgcgaaaaactgatgatgccggcgacggctccgactgcgaaaagcagcaggacacccagccggaattcgctgacagcctgtaaaatgtattggtattttcccagcagcagcaggatgaaggcgcctgaaattcccggaagaatcatcgcgcagatggcaacagctcccgaaagcatgataaaccaccagtcgttgggcgtttgcgtcggggaggcgatcgtgatccagaatgccagcgcggtgccgacaagcagtcccagcagcgaagtgaggttccacttccgaatatcccgggcgacgaaagccgccgaagcgacgatcagtccgaaaaagaaggaccagatttcgatcgggtgatgcgccagcaggtaagtcatcaaccgtgccagcgaaaagatggcgataccgatacccagcagtacggagaagagaaagctgccgttgatgcggcgccagaatttcctgaattcgaaccggccgagcaatttcaacgcagtcggattgaaacttttgatcgactcgatcagttcgctgtaaattcccgaaataaaggcgatcgtcccgcccgatactcccgggacaacatccgccattcccattgcgcagcctttcagcgccaacagcacgtatctgaacataatccgctctaataaaaagttaggcaattcatctttcaatgtaccttttgacaattccgagaggtgtctattcgctgttcccggttgtatcggtaatgctcctgcccataaattccttcccggaagggacttaaggcgctttactcccaaagaggtacactaaagtatataatcacgaaaagttatctcgttcgtcgaaaacacgacgtttcgcaaaaacggcattataataacatcgcatgggtattgccgtttccggcgatgttttgcttgtgcaaagatagtatatgcgggaaacatcgcaagattttttcgggataaaaccctgaaaaaatccatcccgaacgaagatttaataattcgttaataataccgttcgaggattccgcctccgacgacccgttcccctcggtacaaaacgacgggctgcccggcggccggggcccacgcgggatcctccagttcgatccgaatccccgaagcggcagggaagaccgctgcgtatccctcggggttgcggccgatgccccggatcaccgcacggatatcgcgggcaccgaatacctcgtcgctctctaccaggcgacattccccgacttccagcgtacgatgcaacaacagcttctcttctccggctacgatccggtttgccgccgtgtcgatagcgaccaccgcccagcccggcggcaggtcgaggccctttttctggccgatggtgtagagggccgccccgtcgtgcgtgccgagccgatgtccggcagagtcgatgatggggccgggccggagcgcttccgttttatcccggcttcgcaggaagtcgcggcacgggcgtccctcgagaaaacagacgcccatactctcccgacggtcggcgagttcttcgacgatatttcgtttgatgaccgttcccatcggagtcagcacccgatcgaggacctcctgcggcaagtcccacaggtagtaggactggtccttgcggttgtcggccgcacgggtgacgtatcgtttgccgcctgcggaggtaatgcggaaatagtgtcccgtagcgatgtagcgaatccccagtgcgtcggcctctgccgcaagacagggccatttgatccgactgttgcagcgcgtgcacggagccggggtacgcccccggaagtaactgtcggtaaaatagtccaccacctcccgttcgaaccgctcccgcaccgaccgcattcgccagggaatcccgagtgccccggcacgcagacgcgccttttccaacaatgcggaatcgcctctcatgtcgagcgtcagagccgttacatgatatccggccgcctgcaacaatccgacggcggcgaagctgtctattccgccgctgaaacccaacaatacccaattatccttcataaaactcctgtcttcatgagaaccggctgccgaaatttcggcagccggttctgtcaagcatattcttccggcttcgggtgttcttcttcgaagaattccggtttttcccgtttgatgaacccgatcacctcttccaagccttcgaggaatttggaaaaatcctctttgtaaaggaatattttatgccggtcgtaactgaccgttccatccggcgccgttttcttccggctctccgtaatggtaagaaaataatcgttcgcacgcgtagcgcgcacgtccagaaaataggtccgccggccggcttttacgactttcgacaggatctgttcgccgaaatcttctccgtccgtgcggaaggtattcagagcagccatacaaggtaatattttgagggttattcgtttgttccatacgtaaatataaaacaaatttcgttttcctgcaaattcttgcccgtgattatatatctttgggcgtgcagcgactcaaacccctttcgggaacgggattcgggcaggccgaattataaactcaatattacgagtcgtgaatacgcgactctcggaaataacgtgatgcaactgcttattgccgctcatgctgcgcttccaggagtggcagcccctctgcctcccagtttttcagcaaattgagcgcccggatgaagtcggcatcatcccttgcgtgcaatatccgcagcagagcttcccggtcgaaaagccgctctgccagcaatgctttgagcaggcgcctggtccccgcttcgacatcggaatcttccgccggaggtgttacgccctgttccagtcccagtccgatcaactcctcatacatttcatcgggaacttcgaaccgctcctcgaacgatgcgaactccggataatcccgttccagggctgcccgggtgcggtccaggtagtgctgcataaattcaggaaagatatttttccgcagcagggcgttcagataagatgcctgcaccgtatcctgtattacgcacacgtcgggcgctatgcctccaccgccgtaaaccgtccggcccgtgcggagtgtccggtaggccggcgacggaatcgtgtcgggcagcgagtgagttcggtaagccgtgcgatccccgcctttgacgtaaggacgttgaatttcccggcccgaaggcgtatgatagcgggcgatgaccagacgcaaagccgacccgtccggaagcagatattgccgctgcaccaatccttttccgaagctgcggcgcccgacgattatcgcgcggtcccagtcctgcagcgctccgctcacgatttcgctggccgatgccgaccgttcgtcgatcagtacgacaagccgcccttcggccggaaataccggattccgacgggcggaatggacgacggacgggacgctgcggccttcggtcgaaacgatccgcgagcctttgggcagaaaaaagccggacaaagcgatcgcctgatccaacagtcctccgccattgccccgaagatcgagaatcagctccttcggacgatccagttcttcgtaggcccgctgcacttcccgcatggtggtctgaccgaaacggatcagtctgatgtatcctaccgcagaatcgacccggtaggccagttcgacggaggggaccggaatttcccgtcggacgatttcgtatagaattggcagacgaattcctcgtcgaatcactaggatttttactttcgatccggcatctccccgcatggcggagatgagctcggaggccggaatctctttcacggcacgtccgtccacccggacgatccggtcgtcgggacggatgcccgcttcttcggcggcccctcccgacaggagggaggttacgaccagcgaatcacggatccattgggtctgaatgcctattcctccgaacttaccccgatagaggctccagaattcagccatctccgcagccgaggcatattcggtatggggatcgagttgctgtaccatgctgcggatcgcctcctcgaccagcggcgccatatcgaccgaatcgacatacatcttacggatatattcgtaagaccgctccagcttggcgagcgaccgtcgctgtgcccggtcgggccgggaaacggcgatatcggccgtccggaacgatgataatcccgccacggccagcaacagcccgaaaaaccacatgctccgcttcatatcgaattacatgattgcatatttttccgtccggcgtcctcccaagcaggtaccgcgaaacaccgggaaatgatttccgactgcgagcagggaggaaaggcgtgaaccccgtcttctttccggcgattcggtagagccatagataccgcctcggatgcacccacattcggaacggggcgtatccgccgataactctgctctctcaactaccgccggggcggctattccgcgtccgctcggacaggcgcttcggattatctataactaattatctaacggagtgcttcggccagtcgggtgaacggcacctgggtctgttcgccggaggtcatatccttgatcgtcgccacccgttcttccagttcccggctgccgacgattaccacgcaggggattccccggcgattggcatactccatctgttttttcatctttccgttttcgggatatatctccgccggaatacctgcggcacgcacctcctgcaacagtttcagcgaggcatgctcttccgcttcgcccagattggcgaacatcacccgggccgcacagcccagatcggccgggaagagtccgaggccggtcatcacgtcgtagatgcggtccgcaccgaacgaaatgccgacacccgacatgttcggcattccgaagatgcccgtcaggtcgtcgtagcgtccgccgccgcagatcgacccgatggcgaaatcgagcgccttgacttcgaaaatcgctcccgtataataattgagcccccgggccagcgagaagtcgagctcgatcggcagctccacccccagccggttcacgtacccgaagatcgtttccatctcggaaatgccttccagtccgacagccgaggagccgatgacatctcgcaacacagccagtttccgttcattatcgcctgtcaattcgagtatcggttgcagcttttcgatcgcatcggagccgatgccgcgttccgtcaattcagccttgacagcctccaatccgatcttttccagcttgtcgatggcgaccgtaatgtcgatcatcttgtccgcatgtccgatggtttcagcaatgccgtacagaatcttgcggttgtttaccttcagcgatacgttaattccgagcgtccggaaaacccgttccacgatctgtatgagttccacttcgcacagcagcgatcgggtgccgatgacatccacgtcgcactggtaaaactcccggtagcggcctttctgcggacggtcggcccgccagaccggttgtatctggtagcgtttgaacgggaaggcgatttcgctctggtgctgcaccacataacgggcaaaaggcaccgtcaggtcgtaacgcaatcccttttcgcaaattcgggaggccgtgcgcaactcttcgtcattcagtccggcggcgtaatcccccgaattgaggattttgaaaagcagtttgtcgccttcgtcgccgtatttgcccagcagggtggagaggttctccatcgcaggcgtttcgagcgggccgaagccgaaggtgcggaaaacgtcccggattttgtcgaaaatatattggcggcgcatcatctccagcggggagaagtcgcgtgtgcccttgggtatggagggtttttgtgccattttattccaccagttttctgtattttacacgatggggctgcgtatcgccgccctgcgctttcttccactcctcgtattcgctgtacgaaccttcgtagaagaccactttcgaatcgccttcgaaggagaggatgtgcgtggcgatacgatcgaggaaccagcggtcgtgggagatcacgacggcgcagccggcgaaattctccagaccctcctccagcgcacgcaacgtattgacgtcgatgtcgttggtcggctcgtccagaagcagcacattaccttcctccttgagtgcgagggccaggtgcaggcggttgcgctcgccgcccgacagcatgccgcacttcttctcctgatcggcgcccgtgaaattgaaccgggccacgtaagcgcgggcattgacctggcggttgcccagcataatcaggtcggtaccctgcgaaatcacctcgtaaacggttttttccgggtcgatggacttgtgctgctgatccacgtaggccagtttgaccgtctgaccgacagtgaaagttcccgaagtaggctgttcgagtcccatgatcatccggaagagggtagtcttgcccgtaccgttggggccgatcacaccgacgataccggcaggcggcagcgagaagttcagtccctcgtacagcacccggtcgccgaaggctttcgatacgtcgtgcgcctcgatcaccacatcgcccagacgcgggccgttcgggatgaatatttcgagcttttcctccttctgtttggtatcttcgttcatcagcttgtcataggccgacagacgggctttcgacttggcgtgacgtccggagggggacatacgcacccactccaactcgcgttcgagggtcttgcgacgcttcgattcctgcttctcctccatagccatacgggtcgtcttctgctccagccagcccgaatagttacctttccagggaataccttcgccgcggtcgagttccagaatccagccggccacgttatccaggaaatagcggtcgtgcgtcacggcgatcaccgtgcccttatattgttgcaggtgctgctccagccagtcgatcgactcggcgtcgaggtggttggtcggctcgtccagcagcaagacgtccggctgctgcaaaagcaggcggcacaaggccacgcggcggcgttcgccgcccgagagtaccttgacgctctgatccgggtcgggacagcgcagggcatccatcgcacgctccagtacgctgtccagctcccagccgttcacgtggtcgatctgttcgtacagttcgccctgacgctcgataagtcgggccatctcttcgtcgtccatcggctcgcagagtttctggttgatctcctcgtactccttcagcagggctacggtcgaggcgcagccctcttcgaccacttcgcgcacggtcttggcatcgtcgagtttgggttcctgttccaggtaaccgaccgtataaccgggcgagaagaccacttcaccctggaaattcttgtcgatacccgcgatgatcttcatcagagtcgatttacccgagccgttcagaccgatgataccgatcttggcgccgtagaagaacgagaggtagatgttgttgagaacttttttctggttggtgaaggtcttgcttacgccgaccatcgaaaagatgattttttcgtctgccatatttttctttttgaattatttgcggagttacaccggaataacgcaggtcgcgctacaagccaacctgtttcgacttgtccgaaacgcgatctgtccgggtccgaatctatttgggaacaaagataacgcaaaccgggcggagcgccaaatttatttgttctccgcagaaatacggcttttccgcaaaggcacgcgaacaaatcgcagtgcgaccgttgccctcttgttgaaaaactacaacggaatgcctgtggcataactggtgctttcgcccggatcgaagtttacgggaaaagagatcagataccggcagggatgccccatttcgagaagcggcgtccattgtcccgatgtgtcgagaatcagtttctgcacgtgttccgtcagtgcaggatgaggtgattccgatgcgccgaccaaagtgattgtgccgtcaggttctatatagaactcgacacgtacggtgccgtacacacccgcttcgtacaacttcgtatcatatacgagatttcggttcaaatattcgcggaaagccatcaatccgtcctttttaccccggaatgtcggcttgacgaaagctcccggcaggaaattcatattgatcagcatttttcgcacatacgggatttttcgaccgtccttgtatgccggggtgaaagggttcaattccgataatgccgtattcaacagctcccggctgcgctgggtcggattgaatcgcactccgcccagcgaatcgggatattgtacatcgacgcagcgtcccagcgtgtctatcgtaaacttcataagcaattcatgcgagagttcttcgattcggtagccgtcccgcttcatgactttcgtcaccttcttctcgaattgtttgcgaaaaacatccgggtcgtccgaccctgcatatcgcggcggaataatctgcgctgctgccggcaaacttatcaggcaaagaatgagagaaattatttttctcataatgtaaatgttttatcttaacctgaaatcgaccggaatattaaacctctgttgaatgggaacgccaaaataggtcgcaggtgtccatttgccggaagtcgataaaataattttcttaacacgataactcattttcggatgcggcgattccaatactttatcgatcttgacagaaccgtccgcatcgacgataaaggtaacggagacccgtccggaaacaccccatggccgaagctcttcgggatattcaactctttttgcaatatatctttgaagcgctgtaaaatcattcggctcgctctttttaaagcaggccagggtaattacttcagggatataggcgaaatcgtattccatcgtctgtcgggaaggaactttttcgcccctttccgtcgcgggctgaaaagaatcgattccggccaacgccgtgcgaagcagctccagcgtccgttctttcacgataatcgtttggcggcgacaggtgtcgggaatttccagatcgatgcagcgtcccagcgtatcgatggtaaaattcatccagaagtagtgaataaggtcatcaggagtatagccgtcgctatagtaaacctcagtcacacgttccataagcgcttgccggaacagctgaacatcgtccgaaccttgaaataggggaggagtggtttgggcctccgcaatcgtgcacgaaaaacaggataaaaacaagagcaggatctttttcatgggaattgggtataatatttgattaaaaatacgacataattcgtcgcggtccaaatattcctgcggcaaaatgcaacggatataaaaaattccaatgcgaacataagaaataaataacggttatcgatggcttttcccgttcgtttatcgtatatttgtagagagaaatcaaccacacaaacaaataaattattttcagtatgagcaaaagtgttaaaggtaccaggacggagcagaacctgctcaaagcatttgccggcgagagccaggcacggactcgttatacgtttttcgcaagcgtagccaagaaagagggttacgagcagatcgcaggtgtttttgcggaaactgcggatcaggaaaaagagcatgcgaagcgtttcttcaaattcctcgaaggcggggatctggagattacggccagttatccggccggccggatcggcaccacggctgaaaacctgctggcggcagccaaaggggagaacgaggagtgggacgtgctctatcccgacttcgccaaagtagccgaagaggagggcttccccgaaatcgccaatgcattcaagcagatttccaaagtcgaggcggagcatgagcgccgttatctgaagctgttgagccgcattacggacggcaacttcttcaagcgcgacggcaagatctggtggcagtgccgcaattgcggatttatctgcgaagcggaggaagcgccgaaaatctgcccggcatgccagcacccgcaggcatacttcgaacccaagaaagacaactattaacggagttcttttatcgaacgagcccggatccgttcagcggatccgggctttttatacaatccagggcttttttcggttggacaggtcgtaccggagatatgcggatgaaaagcgataataaggcattatccaccgaaacgggaacggaaaatccaaaatggaaacggttacaaccccaacaggaggcgggtatccgtcatgaatcgctcgtaccgcagccgtgaatcggccggcatggagagggtgtcgccgacctccgaaggggtgatccggtagccgggtgtcaggacccacaccggcgtcagttcgagcgagtagcgcagcgaaccgtcgggagaacgggttacctcgacggtcgccacgattccgccgtcgcaataacgcttccgctggttggacacgaaattaccgagcgaatagagtacgatcccgttactgtcctgttcgtaaggctgtacgacatgcgggtggctgccgacaatcagatcgaccccgtgtcttcgcagaaacccggccaactgccgctgcaccttgttcggtcgacgttcgtattcgttgccccagtgcatgcaggcgatcacgcaatccacgccgtcgtgctcgaccgccgccaggtccgcggcgatccgcaccgtgtcgatgggattgaccgacaatccggaagggaccggaagaccgttcgtaccgtaggtgtagttcagcagggcgaaacgtatgccgcccgcttcgaaacggagcggatgcctcgcccggaaatccgagctgtccagaaaaacgcccgtatgttcgatgccgtgccggtcgagttcccggatcgtcgtacggatgcctttcgatccgccgtcgcagcagtgattgttggccagtacggtaatgtccacgcccagggagtcgagtgcctcggccaaagccgcaggggagcggaagcaggggtaacccgtatagggtccggattcggaaagggtggtttcgagattgacgatcgctgcatcggccgcacggaagcgctcccgcacccagtcgaaagaggcgttgaaatcgaaatcgccttccggcgtacgcgccgccgtgagctggggcgtatgctgcatcaggtccccggcgaagatcagccgagcacgccgtacctccgggagagatggcgtggaaggcatgtcgatttgggctgcccggctccgacgcgacagcgtgtgggtacaacagacgtaaagggcgccgaccgccgacaatccgatgatcgccggaacgatgattttcgaaaatttctccatttcccgccaaaaatacgatacgaggcagaattatccaaaaaactccgtagatttgcgtcggcgtcgatgggcgcattccgaaacatagattgtcatgaataatttgcgaggtgtgctgtatgccgtcgtttcgtcggctacgttcgggttgatcccgctgttttcgattccgctgctgcaaggaggtatgtcctccccggcgatcctgttctaccgcttcggactggccgccgcgatgatggggctgatcgcccttgcgacccggcggccgcttcgtattacgtggccgcaaaccggcacgctgttgcttctgggtgcgatgtattccgtgacggccctcgggctgttgcgttcttacacctacattcccagcagtgtggccacgacgatcaactttctatacccgctgggcgtggcgatcgtgatgacgctgtttttccgcgaaaaaaattccgtctggctgctggttgcgatcctcatctcactggtgggtgtggcgctgctttcgtggggcgatatcggcggtccgcagagcgaccgtgccatcgtcggcgtcgggttcgcgggagcgaccgtgctgacctacacgatctatatcgtcggtgtgaaaaaaagccgtatttcccggctcgatccgatgatccaggctttttatgtcctgcttttcagcgcctgcttcttcctcgtgtacgctctgtccacgaccggtgctccgctgcccggcaagtggcatctctggcaaaacctcctgttactggccctggtgccgaccgtcgtatccaacctgacgctcgttctagcaatcaaggagatcggttctacgatgacatcgatcctcggttcgatggagccgctgacggcagtactcgtcggggtgctgcatttcggggagaagttcggcctcgacagtgcctcgggcctgatactgattatcacggcggtcatcatcgtcattcttcaggccaagaaaaaggaacatccgcaaaccctcccgcacgaaagcatccattagcttcggcagtaacggctgcggaggaaaccttccgacaaggagcgacggactaccgctcctttttttcaggccgcttgggaaaccaccctttttcgacccgcttgcgctgttcgaacaattcgccgatactccagaacgaagaggcgccccagactgccaacagggtggaccagacgatgttttcgaccagtacggaaccgatgaccgccgcgattcccatcaggaggaaaatccaccagatccgcactccgaaatagtattcgcctttagtcaccagcggatgaaaaataccgatgatgagaaatgtggcgacaccgattacgatgccggccagatgatattccatcaaaaattccatagttcaactcttctttgtttttccgaacaaaatacgtgccccgtcggaaagacagacacggaacacgttgcaggaaatgtcccgtcgatgagcagttcgttcgctgcaaagatacgattaagccgagggcaaaaacaaatttatttgtactttgccgaggcggagtatctaagacgaagtcaaagattgggatcaagccgagattttatttgcattttgccgaagcgggatggagtcaaagatacggaaagccgagagaaaacgagaacttgttcacagttttccggggcgcattctatcttctacaaagatagagaaaggaagagcaattgtgcgggctcgcacgtaaagatttccgggccaaaatcctatccgtcgccctcaaaatataatccccggcaaaacaaaattggtttgttcgaccggggtgttatatcgagatgcgctacctaacgccggtatttgagccgcaggctgttggctaccacgctgacgctgctcaacgccatggctgccccggcgatcatcgggttcagcaaaaagccgctgacagggtagagcgccccggcagcgaccggtatgcctacgaggttgtagataaaggcccagaagaggttctgtcggattgttcgaaccgtttgcttggagagccgaatcgcctccggaatcttcttgaggtcggacgagatgatggtcatctgcgccacgtccatcgcaatgtcgctgccccggcccatggcgatactcaagtcggcctgtgccagcgctgcactgtcgttgatgccgtcgcccgccatcgccaccttatgaccgagggtttgcagacgcttgacgaacgcggccttgtcctgcggaagtatttcggcctcgaaatgccggatacctgccttttccgcgatatgaccggccgcagcccggctgtcgcccgtcagcatataaacgtcgatcccggcggcttgcagttcgcgcacggcctctacggagctatccttgatgcggtcggcgatcgccgcgacagccagggcttgctccgaatcggcgaaccagacgatgctcttggcttctgccgacaaccgctgcgcttcgatattcaactctttgccgacgacgattccctgctcgtcaagcagccggcggctgcctgcgaagtaatgcacaccatcgaccgtgccttctacgccttttccggtaaggcttccgaaccgttcgacgttcagcgtcggcacatctgcaaaatagtgcacgacggcatcggccagcggatgttccgaaaatttttccaggctgagaaagacggcttccgcccggtcgtccccgttcgcccagacgatatcggtcacgacgggtttcccttcggtcagtgtacccgtcttgtccagcactaccgtgtcgatctttccggccgtctccagacttacggcgtccctgatcagaattcctttctcggtccctttgccgatgccgaccatgacggccgtcggagtagccagtcccaatgcacacggacaggcgataaccagtacggtcacagctgccaggattccgtgcgtcaggcctcccgatggatcgaaaaccagccacaggacgaaagaaagcagggcgatgccgatgatcgcggggacgaatatgccggcgattttgtccgccagcttttgcacgggagccttgctcccctgcgcctcctgaaccatgcggatgatctgggccagcatcgtcgcggctccgaccttctccgcccgaaagcggaagctgcccttctgattgatcgttccggcgaagactttcgttccgggctccttatgcacgggaagcggctcgccgctcaacatgctttcatcgacataggaatcgccttcgcaaaccgcaccgtccacggcgatcttctccccgggccgaacggccagaaggtcgccgacccggatgcggctgatcggaatctccgtctgcgtaccgtccgcagcgacgacgatcgcatttttttgttgcagaccgatcagctttttcagcgaagaggtcgtatcgcctttggccttctcttcgagcgtgcgccccagcaggatgaaggcgatgatcaccgccgcagcttcgaaatagacgtggggttccactccccgcgagagccagaactccggaaaaacgaggttgaacagactgaacaggtaggcgatgcccgtactcaatgcgaccagcgtatccatcgtggccgaacggtggcgcaactgctgccaggcattcacgaaaaatccgcgtcccagccagaagacgaccggagcggacaacagcgccataatcgcaccgccgcagggcatatccataaagaacataccgatcacgaccaccggaatcgccagcacgacagcccagaaagcccgccgtttcaggtcccagtaccgctcccggttcatccgctccaactcgtcgggcgtgtcatcatccgaatcggcgagcatatcgtaaccgccctcctgcacggcttgccggagtttttccggcgaggtctgcatcgtgtcgtattcgaccgctgcggtcgaagccgccagattgacggaagccgcgacgacgcccgtctgggcattgagaattttttccacacgtgcggcacatccggcgcagtgcagccccgcaaggggaaaagtccgttttacatatttacctttcgacatactttttgatttttttacagacagggacgagcacggaatatccgcacgcccttcgtgtcctttcgatacaaagatcgggacaaaaagggcggaaggcgttatataattccggatactatttacaagatttcggaacgaccggcggattacaccttgtccagcgatttgcgacggttctcgccgatcttccggaaatggctgggcgtaagtcccgtcaccttcttgaactgggcgctcaagtgggccgtactcgaatagttcagcttgtcggcaatctcgccgagcgacagctcgccgtaagccagcaactccttcacccgttcgattttctgtgcgatgaagtattgttcgatcgtcgtgttttcgatctccgaaaacaacgaactcactgccccgtaatcctgatgcaaccggtccgcgatataatccgagaggttggtccgcaaagcggcgtccttctcccgcaccagctcgatgaccgtattcttcacccgctcgacggtctgcttgcggcggtcgtcgatcaactcgaacccgacggcgcggagcgcttcgtccaactcctttcttcgctcggcagtcagttctgcgggcagcacggcttcgccgagaacgaccgacgaggcctcgatccccgcctgccgcaaaatatcgcgcacgaccagaatacagcggggacaaaccatgttcttaatgaagagtttcatcggcaacggaaagaatttgtcgatgacaaagatacgattaagccgagtgtaaaagcaaattttatttgcattttgccgaggcggagtatctacgacgaagtcaaagattgaggaaaagccgaggcatatcggcaggttgcggtagagcaggtcgatattcggtggatcgaaatatacaatcaaaaaataaatgacacttgacaggcttgcataactgtcgatttttatttaatttagtcataaaaagatggttttatactatgtatgacgcctttatttgatactataacgctttctatgataaaacgccttaccttcagcttactcctgacctgtttgtatgttccctgtttttcccaggaacgcttcgttgtccggggccgtattctcgatgcggaatccgctccggttccttattgttcggtcagcattctcgaatcgcgcgactccacgatcctcggaggcgccgtttccgacacggaaggccgttacagcctgcatttcgagcaggcgggccgctatctgctctgctacgaccatctggcctacgaatcctgctaccgaacggtagaggttccggaggcgcaaaccctgcccgatgtgattctacgtccggccagccgacatatcgacgaggtggtcgtggtggcccgaaataccgaatacagggcaggccgctacgaagtcaatatgttgggtaatccgatcgtccgcaaccggtccgtgatgcaggtgctggatctgctgccgggcctgcgggcttccgataataccttgtccatcaagggaacgccggtgtcggtcgtctatatcgacgaccggttggtaacggatctcggggagctttccgcccttcgtgccgaagacgtgaaaagcgtggaggtccagaacaagacgggagcggcctattccgccacgacttctggcggtatcgtccgtatccggctcaagaaactcgccgcaggcagtttttacggcaacgtatcttcctccgcgtccgtttcccgcgacggatattctacgggactcgccctgccgttctcggcccagtgcggacgattgggaatatatatatgtgtcgggttcctatggggagaacgaaacgctcgaccgcacctattccgaatttcgcaattcgggatactcgctcgattcggaggaccgggggcggatcacctcccggaatatccgcgaacttctgagcctggtttacaagataaacgaccgccattcgatcggtctcgggggacagattttcatgggagcgagcgacccgtccaatacggtgcacacgacctctgcgggattggcctggggcgatgtaccgccgcagatgcccgaagccggatatacgctctaccgctacggggggggcacgctctacaaccggcagtatcaggggtcgctgaattatatcttccgtttcgacacgttgggttcccggctctctttcaaggccgactacctgcaccagaacgtcgatcggaattacgactacgacacgcgcgatttttcccggccggaggatgcggaacccttctccacggagttgcggcgcgagcgctacaagctgctgggacatctgttcgcgtcccggctcgacctgaacaagaatttttcggaagagcgctcgctcgatgtggggttgagctatgatttgcggtatgcggacaacaacgctcccgtgcatcgcttcgaggaggaagagtggatcccggacccgaagatgagtacctggtttatcgaccgcactcaaagcacgggtgcctacacccaatgggccgatgcctacggcaagttctcctatcaggcgggcctgcgactgcaatgggatcgcatcgcttaccggaatgccgaaaatacgggctacgaacatcgtgactactggcggcttttcccggaactcagcctgacctacacgttcaacccggaaaagggcaccaatatcaatctcgacctctatcggtccagcggccggctgcccgacaacaacgccctgagtccccgccgggtctggcagtcgcaatacagttataccgtaggcaacgaaaatctcgaacccggctgggggtacgacatcgacctgagctatacgctgcgcaacaaactgacgatctcttacggaggtacgtggtcgcgcggcagtgaaacgatgactttctatgaccccgacgatccgaacatcgtctatacgacgaaggtgaacggggaacacggctcggcgcataatatctggatcgattatacgacattggtaaccaaatggttccgagtgaaatctttcattcacggatattggtatcggagagaggtggatggcgactggcaggcttcgtacagtgccggaggcgggatgttcagcctttcccttatgttccagccgcatccctcgatgattatctatctggacggaggcgtcgagctgccccaaaaaagattggaaacctggcaaaattcctattgggctttagctgccggaataaccaaatcattctgtaaagacaaactgtatatatccctcgacgtgaacaatatcctttcgaccaaactgaaaaaggaaacggtacgctgggacaactcctactattccgtcctgcggcaacctcggggacacagaagtctgcggctggtcttttcgatcggctaccggttcaaccgaaatgccaaaaagagcgtatcgaccgtgcaaacgttacgagatccggaagaaattctgaaataggccgctcaagacccgtattcgaatccagtgcgcaagacgtgctttccgagaaccgtattttgtgaaacttttccgctcgatatatgaatagtggaattggcatcgcttttctccccggcaatccgaagcatttcggcgctttcacatctgcctcaaaaaccaaaaaaattacggacggctgcatccggcagccgcccgtaaaaaattccgccctccgaaatcagaagttgtagcgcaccatcagattgacccgattggcatggcccttcattccgtccatattttcgcgggtgccgtacaggtattcggccgcaagctgacagcagggggccaaatcccagaaaatattgccgaagacatactgaccgcgacggtattcgtcatcggcataggccccgttcctgcggcaaacctccgccatggaataaccgcccgaaatggcgagtttgttcggaacgaggtcgatttgcgcagccgcctgccaaccgtacatcggcatagtctgaatactcctcggattgtgaggattgggtgtaaaatccagtccgatgcccgataaatcttggatgtagggagtgatgccctcgccgtacacaccgttgaagaagagttgcaggggacccgctactttgatatttccgctggcctggacgccccagccgaagagcgaagtattgttacccgtcgattcgttgtgcagatacatatcgcggaaaacggccgatgcccggaaatggctctccttgttccggccccaattcacctgcatataaaccggaaaatcgggtacgcgctgcggaatcgaagcgaacgaatcgccgtaggtgccgcttacgttcggtagctcggcggcaacgccgaatttcagaatatcgcggtagatcgaatgctcgtaacggatcatcgtcgagaaaaagtagttataggcattgggaccctggaagtcgatcgtattgggagcggcgttcaggtcgcagaacgtcgttacgtcgcgtccgaacgtgaaccctttgaacgatacgtaagccgaccggatacggggcgtataactgttggttcctccgccgcggaagtccgtactgaaatagagggtgacacggcccagttttttcgaattggcgatggccttcagaaatatgcgggaggtagttccgtccaggccgaatttctgacgggtggcataggtgccgggaacggcgatcgtggccggaatgaaatcctgtgctccggagattccgtcgaagtcatacgacgcacgcagagtcacctggccgccgagcgagaaagagaatttgttctgcttggtggcgaagatgaagtgaggcagttcatcctgctggaaaccgggatgatgggtttcgatataatcccgaatggcattgtcgattgccagttggttcaatacggccgcttcgagcaaggcctcttcgtctgcaggcggttgaggtgcattgacggaaaccaaataaaccgtcggagagtattcgccggtctttacgctgtccttacggatctggtaggtctgggccgaaaccgaggccgcagaaaccgccagcaacattgcgattaaaagtcgaaaaattttcataagcaataaaattaaattattccgataatggcggatgccatctatatatgtatattacgattttggaagtcagacaattggtatttgcccgaaacgtggcaagttatatgccaaaatacccggcaagaacaggtgcagcaggtcggaaagcgggatcctccagcctgcgagccggaccggtcacggcatctgccagacgttcgaacctattcccgaagtcttcggacggatgtcggtctcctttccctaaataaaattccctcaaaaagtgtaaaaaatgaacagaaggcgttggcaaatcctgcaaatcggataaactaacggcgaaatagttatttccgaaacggtcgctatccgatatttttgtatttttgtaaaaacatatttttcatatgaaacataagttagtgatagcaatgactgcggcaacgctgtttctggtcgggtgcgggcagcggcaacatacggaacaggtaacgctcgtgcgcatcgataccgtaaaaacagcgaatacctgtgatattctcgaatttcccgcccgagtacaggctgccggagaagttcacctcgcattcaagatacccggaaccttgcaacgtatttatgtcgatgacggagcttttgtccgtcagggtgaacttgttgccgaaatggatccgcgcgattacgaacttcagttacaggcggtcgaagccgaatatttgagtatcaaggccgaagccgaacgtgtaatggcgctttacgaccaaaacgtcgctaccgccgatgcttacgacaaagcgcgatacgggctgcaacagattacggcgaaatacgagaacgcccgcaaccaattggccgatacgaaactgtatgctcctttcgacggctacgtgaagcgtcggcgcttcgaccctccgacggtcgtagcggccggaatgccggtcatcacgttcctgtcgggcaagaatcccgaggtcgaacttttcattccggcatcgacttacattcgccgtcgggagatcgcttcgtttgcggcggtgttcgattttctgcaagggcaaaaaattccgctgcgtctgctccatgtcgatccgagcgccaatgccaatcagctttacgccgtgcggttggcactgcccgtgaatacggagatcgcggcgacacccggcatgaacgcaacggtcgaagtcgccatgcggcaggaaacggaggcatcggtagagattcctgcatcggctctgttcagcaacggcgacaagacgagttacgtgtggatttaccgacaggacgggacgatcgcacgccgacgggtcgaagtagtccgtctgcatacggacggaacggcgacgatagcggatggtctgaacgaaggcgaacggatcgtcgtggccggagttcataaattgacggaaggccagcgggtcgcaccgcttcctgctccgtcgaaaaccaatgaaggagggctgctatgatcgacttgggcaaatgggctttcggacacagcaagctcgtctattttctgttggcggtactgttggtaggcggtctgaaatcggcctacgacatgggaaaactcgaagatcccgaagtcaaggtaaaaatcgccatggtggtcggggttcgtccgggagcgtcggcgcacgaaatggaactggaagtgaccgacccgctggaaaaggcgatccgtaccgtcggagaggtggacaatacgcagagttggtcgtacaacgacctctgcatcatacaggtagaactcaaaagtacgacgcccgatgaccggctcgaacagtgttgggatatgctgcggcacaaggtttccgatgcggaagcgtcgttgcccggcggtacatccgtgacggttcaggacgatttcagtctggtttacggtatgttttacgccctgaccgccgaaggcttcagcgaaagacagctcgccgactatgccggactgatccagcgcgaattgaccgatctcgacggcgtggcccgggtggagctttacggaaagcgcgaggagagtatcgatatttcgctgcgtgcggaccgaatggcgacactcggcatttcgccaacggaagtactcgccaccctgaacggacaaaacggcactttctatgccggttactacgacaacggggatcaacgcgtgcgcgtaacggtcaccgataagtcgcgtacggtcgaacagatccgcaacatggtcattcagggccatgaagacgaccagttgcgtctgggggatattgcgaccgtagagagcggctatacggaacccgtacgcaattcgatgacctataacggtgaacgtgccgtcggtatcgccgtagccgccgcctcgggaaccgacatcgtaaaggtcggcaatgcggtcgaacggcggctcgccgaattacaggaggaacgttttcctgcaggcgtcgcttgccacaaggtcttctatcaacccgaacgggtaacaggggccctctccactttcttcatcaatctggtcgaatcggtattgatcgtcatcgcgattctgatgattacgatggggttccgcagcggcgtaatcatcggattcagtctgcttacgatcgtcatcggcacgtttctgctgctgggtatgaccggcggcacgatgcagcgggtttcactggcggcgttcattctcgcaatggggatgctggtggacaatgcgatcgtcatagtagatggtattctggtcgatctgaagctgggcaagccgcgccgcgaagcgatgtgcgccatcggtcgtaaaaccgccatgccgttgctcggagctacggtcattgccatcctcgcatttctgcccgttttcctttcgcccgatacggcaggcgtctatgtgcgcgatctgtttatcgtgctggcggcgagtctgctgttgagttgggtcctggctctggtgcacgtgccgctgatggcgaatcggcttttgaagcaaccgtcgaggaccgagggaagcggtaaactgtatgacagcacgttgtatcgtcgtttcggcgatctgcttcgcttcggtttgcggcaccgtatcgcggccctgtcggtcattctcgttctgctcggattgagcgtctggggattccggtacgtgcggcagggattctttcccgatatggtttacgaccaactctatatcgaatacaaattgcccgaaggtacgaactccacacgggttgccgccgacctgcgggaaatcgaagcgtaccttaagactcgtcccgaaatccggaacgttgttgcgtccgtgggcgggacgccggcacggtataatctggtgcgcagtatcgccacgccgtcgctctcttacggagaattgatcgtcgatttcgaatcgcccgaatcgctggtggaaaacatggatgtcattcaggaggatctttcggcccgttaccccgacgcgtacgtcaaggtgaagcgttataatatcatgttcaaaaaatacccgatcgaagtgcaattttccggacccgatccggcggtactgcaccggttggcggattccgcacgaatgattatggcacgcacgccccaggttgcgcagatcactaccggctgggaacctgcggttcccgttttggcggtggattatcaccaggcggccgcccgtcgtgccaacctgagccgccaggatatcgccacctcgttgctgacggccgaaggcggtattcccgtcgggacgttctacgaaggagtacatcgcaatacgatctatctcaaatgtacggcggccgacggctcgcgcatcgacaatccggagaacgtacccgttttcccgatgctcccgaatgtaaatgcgctgcttgacgacgaactggtggggagccttcagaccggcacgctcgacaaaggcgatatcatccgaaggctggcgcagaccatccccctcgggcaagtcggacggggtgtcggcattcgctgggaagatccggtcattccgcgctataacggtcagcgcatgcagagcgtgatgtgttcccccgcaccgggtgtcgaaaccgaggcggcacgacaaactattgccgaacagatcgaagacattccgttgccgaccggctattcgatacgctgggatggtgaaaaaggggcccgtgaccagacgatgtactggcttttcaaacaggtcccgctggccgtagtactcatcatcgctgttctgattctcttgttcggcgactatcgtaagccgacgatcgtgttgtgctgcattcctttattggccgtcggcatcgtcggagcaatgttgctgaccggaaagacgttcgacttctgcgccattgtgggtgcgttgggattgatgggcatgctgattaaaaattgcatcgtattgttggacgaaatcggccagcggtgcagcggcgataccgacctcatagccggactggtcgtcagcgcccaaagtcgtctgcggcctgtgatgatggcttcgcttaccaccattctcggtatgattccgctgctcggcgatgcgatgttcggttcgatggctgcgacgatcatgggcggactgttcttttcaaccatcgccacgttgttgtttctgccgatactttacgccctgtttttcaaaatcaaaacgaaataatacgattcggccgcaggccataccttaccgttcgtgccgcaccgatgcggcgcgaacggtgtcgatattcgacgagcgcatcgaacaactgcaacacaatgttcgcccgatcttcggcgcagggcagaacgacgggtgcaaacggacccggctttcactatctttgaagtactccgctgcggcaagacgcaaataaaatttgcttttgccctcggcctaatcgcaatctttgacttcgtcttagatacttcgcctcggcaaagtacaaataaatttgtttttgccctcggcttaatcccaatctttgacttcgtcttagatactccgcctcggcaaaatgcaaataaatttgcttttgcgctcggcttaatcccaatctttgacttcgtcttagatactccgcttcggcaagacgcaaataaaatttgcttttgctctcggcttaatcccaatctttgacttcgtcttagatactccgcctcggcaaaatgcaaataaatttgcttttgcgctcggcttaatcgtatctttgcagaagataggaggcggttcggcaatctgtacgtgccaattcgtgcgattgccatcatcttattatctttgcaaaaacgattccgtccggtcgatctgtcgataaaatgccagagagcgactgaacgcgataacgaaaaaatcgagctatatgatctggtttctgcttctcctctccctgctttttgccggggtggactttctcttctaccgggtgcggatgcgtcggcattccgagcgccttcgccgcgccttcgtctggttcgcggtgttttcggatgcgcttccgatcgtcgtgctgctgctgctcaaggccgtaccggacaatacgacgggctggatgcaggcagcccaatggtttaccttcgtcttcctgttgctgatcggctgtcgttacggctattatttcggtttgttgttcgatcggcctcggagtttcagtcgggtaggggcgctcttcgctgtcggatgtgccgtatggctcgtatggggagctacttggggcagacaggccctgcgggtgaacgaagtcgaaatccggtccgcagcactgcccgccgcattcgacggattccggatcgtgcaattctcggatctgcacatcggcacgctcgtgcggccggaacgggagatgaaccggctcgtggacacgatcaatgcgctgcaacccgacctcgtcgtcttcagcggcgacctggtcaatatccgctccacggaactcacatcggacgtattggccattctggggcggcttcgcgccccgtacggtgtcatctcgaccctgggtaatcacgacgtgggactttatatcaaagacaccgtcgccctgccgcgtgctgaaaacaatcggcaggtaatcgaccggcagcggcagatcgggtggcggatgctgctggattcgaccctctacctgcgccggggcagcgattcgatttcggtgacgggcatctcgttcgatcccacgctgcaaaaattccgacattcgttcgatctccccgaaatatcccttgcggccgcttacgacggcgtaccggagggtatgttcaacctgacggtttcgcacctgccgcaactgtggcccaatatcatcgccctcggtcgcggaaatctcacgctggcagggcacgtgcacagtatgcagatcaagggacatcttttcggacgggcgttttccccggcacaactgatgtacgaccgttggagcggacgctacgacgatgcggccggcaatacgctctacatcaacgacggaatcggatacgtcggctttccgatgcggctcggcgccgatcctgaaatcaccctttttacgctgaaaaaatgaaagtgatcgtttccaccgccgtttcttcggatggatatctggacgaccgttcgcccgaccgcctgatcctctccacgcccgaagactgggccgaagtgcaccgcctccgggccgcttgcgacgctattctggtcggggccgaaaccatccggcgggacaatccctcgctgctggtcggcgacgaagttcttcgtcgggaacgaatcgaccgggggcttccgtccaacccggtcaaggtaacgctgaccgcttcgtgccggctctcgccggaggccaatttcttcacccggggagatcaggaaaagatcgtcttcaccacctgccccgatcccggtcccctgcggcaggtggcgacagtgattcccgccgcagagatcacggctgctctgatcgttaccgaactcgaaaaacggggacttcgctccctgctggtcgaaggaggagctgcgacgctccggatgttcttcgccgaaaatctggtcgataccttccggctggctgtcaatccggccgtaaaagtgggggatccccgggcaccccgtttggagatcggttccggttatctgcaaacgcctcattcgaccgaatcgttgggaggaatgcgggtcacgacctatgcgatcaagcccgaccggaccgccgaagaccgccgctacctgcaaatggcgatcgacgaaagccgcaaatgtaccccatcgacctcttcctattgtgtaggtgcagtgattgtaacgactgaccaaaagatatttacgggttatactcacgaaacttccccgacccaccatgccgaacaggaagcgattctgaaagcacttgcagcgggtgtcgaactgcggggtgcgaccatctattcttcgatggaaccgtgctccgaacgaaaaagtgaaccggaaagttgttcggaattgataattcggcacgaatttcgccgggtagtttttgctctatatgagccggactgtttcgtttgttgccagggcgccctgaacctccgtcgccacagaatcgaagtcagcgtcgatgacacgctgtccgatcaggtccgagcgataaacgcacatatcggccattgataggcttggctattttttgttctgttttacgccgaatattggcctaaataaccacaacaaattatacgtacgaatattcgcactatcttcgcataaaaatttagaagaccattttatgaaccgtgtaatcgtttcatttttcgctctgttagctgccgcacctctggcagctcaagagcaaacgccccgggtactttccctggatgaagccctggagatcaccctctccggaagtccggtcatcgaagcctcgcgttacgaagaaaaagccgcccagcaggaacggcgggcagcgatcggcttgcgtatgccgcaaatcagcgtaggcggagcctacacctatttgggcaaggacatcggattcgacttcaatgatttgaaagggcctgtcggaaatatcacccacgacattctcggtagcgggctgatcccgaccgaattgatcccccagattcagcaacttctcaccccggttatgggagcggattggttcctgacattgcaggaccgcagtctcggattcgtcggagggcaggtaaccctgccgatctatatgggcggcaagatcaacacggccaaccgtgccgcgaaaatcaacgaaaagactgcagtcgagcagggaaaccaaaaccgcaacgcgctggtttcggagctcgtggagcgatactacggtctggcgctggcccgacaggtcgtcgaagtacgccagcaggtagtggatggagtaggccaacatctgaaggatgcgatcgccctcgaacagaacggtatgatcccccacagcgaacgtctttacgtcgaattcaagatggccgaagcggagcgggagcttcaaaacgcccggttgcaggtcgaaaccattgccagcgcactgaataatacgctcggacagcaggcagaggttctgcccgtaacgacgatgttcgtactcggcaacctggaagacgtagcctattacaaagacctggcggccaagttcaatccgctgctcagccaggtagccctcaagcgccagttggccaaggaaggagttcggttgcaacgggccaatttcctgccgcaggtcgcggcgatgggcggagcctcgttctacaactaccaggtaactaaaataatgccccgctgggcagtaggtgtcggcgtgaatctcaagattttcgacggcctgaaccgcgaatacaaatattcggcggcaaaacagacggtcaagcaagtggaagtgctggaaatgaaagccggcaaggacattgcagtactgatcgaaaaactctacaaccaaatgaacaactatgccaaccagatgaagtcgatcgacgcttcgctcgcatttgcggaggagtatctcaaagccaagaatgcggcattcctggaaggtatgagttcctcctccgacctggtggatgccgagctgaatctcgccaaggtgcgcaccgagcgtatgcaggccgcctacaattacgatgtcgcgctggccaagttgctcgaagccgccggcatcagcgatgagttcattagctacctgcaccgtaccgacgcccgtcccattcatttcgacaaagagtaaatatagataatcccatgaaaaaaagtaccattgtcacgatcattctgattgccgccgctgtcgtgctgggcgtcatcttcatcagttggtatttacgcaaggccacgcccctatacatccagggaacggtggaatgtactacatacaaagcttcgtcgaaagttcccggccgtatcgaggagatgaaagtagaggagggacagcacgtcaccaagggcgaactgctctacacgctctcgacccccgaactgaatgccaagttgcaacaggccgaagccgtgaagagcgccgcatcggccatggaccaaaaggccctcaccggcgcccgtatccaacagaaggaagccgcactgaatctctgggaaaaagcccaggcaggactgttgttggcccagaaaaccttcgaccgcgtgaacaacctctatgaacaaggcgtcgttccggcccagaagctggatgaagcccgcgccaacctgcaggcgatgcaggcgaccgagcgtgcggccaaagcgcaatgcgaactggtattcgacggagccagcaaggaggagaaagaggcggcagccgcccaggtacggcaggccgaaggcgccgtttcggaagtggagtcctatctttcggatgccttggtttactcccctgtaacgggcgaggtttcgacgatcatcgccgaagccggcgaactggtcggaacgggttatcccgtagtggcgattctcgatatgagcgacgtatgggtgaccttcaacatcaaggaggatctgatgcccgacatccatatcggaacccgtatgacaggctatatcccggccttggaccgcagcgtggagttcgaggtgacctatatcgccgtgcaggccgatttcgccacctggtccgcaacacgcacgcagggcggcttcgacatccgcacctttgccgtcaaagccaaacccacgcaagacgtggaatacatccggccgggtatgagcgtactggtgaactggaaagacatcgccaaataattcagaaagggtagcgtatgccgggctttttcagcaatacgctcgccgtcctgcggcgggagatccaccgggtcgcacgtcagccgatgtattggctgctgacggtgattcttccgatcgtcgcgttcgcattcttcgcggtgttgttatacaagggagtggcacgcgacattccgatcgccgtcgtggaccaggacaacagcaccctctcccgcaaagtgacgcagatgatcgacgcgacgcctacggcttgggtcgcttacggcgtacaggggatggaagaggccgaacgactgatgcttcagggcaaggtcatgggaatcgttctgattcccgatttcttcgaaaagaacattctcaacaacagccagacccatctgaaaagctacctgaccggcacgaacattacggtaaatggtctgctggcgaaggatttgcaaacgactgtgaccacttttaccgccggtatccagctgcaactgctgatgaaacaggggctgaccgaaaaacaggctatggcgcaactgatgcccgtacggttcgacaaacatgtgctattcaacccgcatatcaactacggctattacctttcgccgagttttatgccgatgatgcttctgatcttcacgatcatggcgacgattttcgtcatcggaaccgaactcaagaacggcacggccagggagtggtacgacacggccggaggctcggtcttcgcggcctacgcgggcaaaatcctgccgattacggtcattatgttcctgatgtcggaattgatgctcctggtcatcttcaaggtggtcggcgtaccgctgaacggcagcctgacggtcatcaccatcagcaatctgctcttcatcctgagttaccagtccctcggtgcgatgatcgtcaccgtgttgagcaatttgcgcctgtcgctttcgatcggcggcggttactcggtactggccttcacgttttcgggccttacgttcccgattatggctatgagcaaacccatgcaatggttctgctgcatctttccgttcacattctacaccgacatcatggtcgatcaggccctgcgcggtgctccggcgatatactcgttgcccgacatgggcatcatcgccctgttcatcattcttccgctgctgtgtctgccgcgcctgcgcaccatctgcacgaataaaaaatactgggggagattatagcgatgagtcgatttaccaaacagataacctcttactggcagcagttccgcaccgtcgtccgcaacgaatacggctcgatcttcacggatgccggcgtgattctcgtgctggtgctcgccctgctgatctattccacgctctattcgctggcttacgggacgcaggtacttcgtaacgtgccgatcggagtaatcgacatgagcaacacttcgaccagccgtcagttgatcaataccttcaatgccggaccgaacgtctatgtggcctacgaacccggcgacatggacgaggccaaacaccttttctacgaccgggagatatacggcgtggtttacatcccctccgattacgaggaaaaactgctcggcggacagcaggcggtcgtttcgctctatgtcgatgccagctattttctgatgtaccgccaggcgttccaggagctcgtgtcgggcatcggcaccacaggagctatggtggaattccagcggttgatcgcaaaaggagccaacatcccgcaggctacggccacgacgcaacccgtgatttaccaaagccacaatttgttcaatccctatctgggatacggatcgttcgtgatgccggctatcatcatggtcatcatccaacagacgatgctgatcggtatcggtatgatcggaggcacctggagcgaattcggactttacaagaaactcattcctccgggacgccggagaatgtccacgctgcccgtcgtggcaggcaaagcgttcgtttatgcgtcgatctacgccgtcaccctgttttatattttgggactgcactacaaattgtttcatttcccgaccaacggtcacacggcggacatcatcgcctttctcatcccgtatctgctgtcctgtattttcctgggcatcgccgtctcgacgctgttccagcgacgcgaacagtcgatcatgctgttactctggtgttcgatcccggctctgatgctcagcggagcttccgtaccccgcgaagcgatgcccgaatggctctaccggttcggccagattctgccgagcagcagcggggtagaagggttcatccggctccaaagtatgggggcttcgttcagcgacgtgttgcacgaggtacgtatcctgtggattctcacgatagtttacggcggattcgctgctgtcggcatacaccttcgcctcaagaaggccgcaggtaaataacccgattaaaatatgagcttctccgaaactatggaacgacttgcttttaccctttttgccgtatttgcagcagtaacgctttgcagcgctcaaaatccgaatgaaacgcgcgttgtcaaagacgcttccggacgtgtgaagtacaccgttcaaaaaacgggagatcgggaaataatcaaggattcaaaagggaaggtcgtaggctcaacacgccaaacgaaggatcgtaaataccactacaattcaaacggcacgtcggcaggctccgaaaccaaacgaaatcagaatggaacacgtatcatcaaagacgcttccggacgagtgaagtacacggtgcgcgagaacgggcagcaggaagtgataaaggattccaaaggacatatcgcaggtacgacacgtacaacgaaagaccgtaaatattactacgattcaaacggctcgtcggcaggctccgaaaccagatggtaaccgacatgcagacagcgggaaagccatcatacggcaagtcctgaatcgaacgaccggaagtgaatggctccgggagtatcgtccttccccaaaaaggttgtggtgactcgggcaggcatattccgcaacgttatgggcctgatcgcaaaggtgctgaaacaaaaagaggggtcgatacccctctcttttatgtttcaataatcatatcgtatattcctcgaccaaaccggggcgcatatcgctttaccggtgcggcggacggaacccgcctccgggaacggtgctgcgccccataccgacggctcccgacgggcggtccgaaacgccttgataatccttgatgttcttcgaacccttcttgccgaagaaccgcaggttatagacgaactgcacacagtaataacgtcccaccacgctgttccaagaattttgtgtccaacccgacccggtcgtgcgtacgaacgctttattctgattgaaaatgtcgtttacgccgatgttgatttcccccagctggttgcgaaagaccttcttgcccacgaacaggttgcagagcagatagctgtcgtcgtaatcgttcgtaaaacccagatactggatataagaagcgctgcccgagagggagaatccccggccgaagatgaacttgaacgacgccgcagcctgatggttgaaataacggttctttcctccggtagcggcgagggaattgacggcttcgttgtacgtgccgtcccacgaaagggtgaagtccacattctcggagatgttgctgcccaacactacgcccgcttcgtaaccgaggttgcccgtgttgttccgctcgccgtccacgaggctcggaatacgcgaatagcttacgccgccccgcagattcaggttgctcttgatgaaattcaccggaaacccgtaactcgcccgtgcccgcacatcccagtagccgtccatattcgtccattcggtgaactgcagcggacggtaaaccgtattgtcgatctccaaagtaggacggtagcgggtgctggtcgtaatatagtcctgggtcgtttcggcccggaacatcagcataaaagtacggcccttctccgcattggaattgacgtagtgcatactcaaattatggctgtacgaaggccgtaagtcaggattaccccgcgtgatgtattgcgcatccgatacgtcatagacattttgcaactgggtaacctccgggttgtccgtataggagcgcaggaacattcgcagcgtattctcccggttcaggttgaactgtcccaccataaaataggtcacattgttgtaggcgtgcttgatctcttcggagccggtacggatcacctcacccgaaaggctcgaacgctgataatagacgttcgcagcgaaagtattgcggtccttggagtagttgaagccggggccgagagagtgcaccgtatagctgctcttgtaagcgttcgacagcaagggatcgggaagcaatcccgtaatatcgtaatcctcgccggtccggtaggttttcttgtcgctctgctggtaattgtacgacgtccgatacccgaggctcacctgcgaatatttggatacgggctccgtataggtcaggcggccgttcagccgataacggtacgaaggattcatcatgcgctggtagatcagctttttcagatcgttctcgtccggatcgggatcgaggtctgggtaaccctcgtaaataccgaaatcgttggtatgggagttttgcttattctgggagtcgaaatagttgaaaaagccgtccaccgtaagcgtacgtcccggcttgcccagccgcacgcggtaaatggccgaagtattgacgctgtaaccgtttcggaaggcatcctcgaaattgtcgatgacgctgtaaccgctttcgccgaactgtcgcccgtaagtcgtactgaacggatcgttcgactgaaaactcaagcccgggcggatcatcagcgactggttgtccgcgattttccattcgatgcgggcattcaggcggttgttgaaattctgtgtccgggaataaccgtcggtgaaaagcgtatcgatcggtgccggatcctcgtaccagcgctcggtacgcgcccgattgaccgtacgggttccgttgaagaagtagctgccctggaaagtcacctgatcccggctgccccaggtatccgaataattgacacccactgcatttaccgaagccacgccgtcctggtgacgaaccatatattgtcccacgccacggccgaagcgaccgccgccatgtcctccgccggaattgcccgtaacacccagaatatcctcgaacgaaaagttctgctgattgacgttgttaaaaagaccgatcagcggcagacggctggagccgctaaaaaaattgacgttgccgccgaccatatacttgtttttggcttcggtttccgtgtcggcgtcgtaaccgtaaccggcatatgccttaccgaatatgccctgacgcatattttcgcgtgtgacgatgttgatcgccttataactttcgccgtcgtccatacccgaaaactcggcctggtcgctcagcttgttgtaaacctcgatccgttcgaccgcttcggccggcagggacttgatcgccgatgtcacgtcctcgccgaaaaactccttgccatcgacgaatactttctggatcgtttcgccctgcgcctcgacagcgccgttattgaccgtaatgccgggcatcttcttcaacagcccctcgacgtcggcatcagcagtcaccttgaacgcattggcattatagcttaccgtatcgcccttttgagaagtgcggagtgcctgcacctccttcactacggtctcgatggcgatggccgcctcccgcagtgcgatctttcccaggttttcggacggctgcgtcacccgaaactccttttcggccttttcatatcccatgaaagtcacggccagggtatatgaaccataagcgaggccgcgcacttgcaatgcgcctttgtaacccgatgtataatatttcttctgatcggggtgggctttgggcacgatttctatcacggcacccggtacctcttctcccgtttcggcatctaccacggtgagcgtaatcacaccgctctgggcctgcgcccgagccaaacctatcgtacacaaaaatacaagtaaacaaattgctctaatcatctcccatcattgtcgtcacacggcaaatatacgataaaaatcgacttttttcactgtccggaacatgaaaaaaggatgaaacaggtcggcctgtttcatccctataaacggaaatatcggcgaattatttcgactttctgcctactttttatccacacacggagcaccgttgcagggtctgcggtgatgtccgggattcgcatcgccttttcgacatgccggtccggcgcaatcgacctttcgggcgggacactctcggcattcgatccattgggcatactgttcgggcgtcagaaccgccttcatccggccggccatctgttcacgctgctgtgccatcgcttcacgcgatttttcagccatctcccggcgttcggcccggtgctccctcatggcttgagcctgttccaggcaaatagggtaaacctgttttacctgttcgtcagagagcgacaggttttctttcatccggtcggtcatctttttcgcaacctgctccgtagtaagttctttgtgttcggcacgacgattatggtgtcccttctgggcccataccgtacccgttgccagcaccagcgctgccagtacgacgatcaagaatttcgctttcatatcaactaccattttaattgttatcggtctttataaccgaatgtactcttgcaaaccaagcgccaatctcttccgacaaatggaaaaaacgacttattcctccttaaaccacgaagcatacagttggtaatcacgggctgtacgcagtacgatctcgtcccgttgttccggggttatttccttgacttttttggccggaatacccgcatagaccgaattgggttcgagcttgctgcccgaaagcaccagtgcgttggccgcgacgatgcaccccgacgctactacggcattgtccaacaccgtggcgcccataccgatcaggcagttgtcttcgatgatcgcgccgtgaattacggcgttatgtcccaccgacacgtcgttgccgatatgggtctgcgacgggtgcttcgagccgtcgaacagggtgtggatcaccacgccgtcctggatgttcgtcctatcgccgatggtgatcgtgttcacatcgccgcgtaacacggcgttgtaccagatcgaacagtcgcggcccaccgtcacgtcgccgacaagcacggcggtttccgccaaaaacgtattttcacccacctgcggggtatgtccccgtatctctctgatatatgccataattcgatatgtattagttggttcttactctttttcagccgccgcatgcttggcttgctgccacaactcttccatccggtcgagcgacagctcgtgcagggtatgcccctcggacgaagcacactcttccatataattaaaccgattcatgaactttttattgcttcgctcgagtgcggattcggggtcgatcccgtacaggcggcaagcattcaccagggcgaacagcaggtcgccgaactcctcctccatcgccgtacggtcgccggatgtcatttcggcttcgacctcggcggtttcctccttcaccttggcccaaacatcctcttttttctcccagtcgaaccccgtcgccgctgctttctcaccgatgcggtaggccttcaccaatgcaggcaggctcacgggaacacctcccaacgtaccgctccgacggtttttcttacgcagtttcaatgcctcccagttggctttgacctcttccggagtatcggcatgcacctccccgtaaatgtgaggatggcgatagaccagcttgtcgcacaaagcgttcaccacatcggcataatcgaacaccccggcctcctcgcccagcttggcatagaaaaccacgtgcaacagcaagtcgccggcctcttccttgataccgtcgagatccttgttcaggatggcgtcggccaattcgtacgtctcctcgatcgtgttgtttcggagtgtttcaaaggtctgtttacgatcccaggggcactgttcgcgcagcgtatccataatttccaacaggcgggccgtcgccttcagtttgtcttgtttcatcgtattgtttctgtattttgaccgataacgaagcgaatatccgcagtccaagcgaacaccttttttccatatctttatgatcggataacagtccgaattcgcccgaggcgatccgagccacagccgattttgtgcaaagatagtgaaagccgagagaaaatgggagcttgttcccatttttccgagacgcagcctatctaagactatgtcaaagatagtgaaagatgagagcaatcccgaatcattgttttttgattgcgaaattcttaaaaaagatcgcgcctttcggaaaaaaccttaactttgttaaagtacctcgcaccggcgaaacgacacttttattcgcttggcagctcataggctgccgaacggcaagagatcgttttcgataatttttcggttgctacgaatggagccaaaagatttatgttatgaaaaaaatcgtcgtattcctgctgcttgtttcaaattttttcccttcgggctgcacccggccgaaacagtacgccgactattcgcggcactcgggtttcgaccgtacggagatcgacagcgctacgctgcgaaacctcgaagtattgggccgtgtgtggggattcgtgaaatatcaccatccggcattttcggacgaccggtacgacttggatttcgaacttttcgagttgctgcctctgatagccgataccgctcctgccgctcgcaacgagatattggcccagtggatcgacggcttcggccggtacaaaacaacgcccgagaaatacgagaagatactggcgtcggattcggttttcgaacaccgcaccgacatcggatggattcgggatacggcaacgctcggccgcgagctttcggagcgtctggtccggctgcgttctgccgaccgaaccgcagggaaccgttacgtgtcgcaaacgtattacgaaacctatgaccaatggtctcccaatccctgtttcgacggagaaaaaccctattacgacttgtcgaatcccgactacggttatcgtctgctcacggtattccgtttctggaacatggtcgaatatttctttccaagtaaatacttgaccgacaaggactggaacgatgttcttcccgaatatatccggcgtatggcacacccgacgggcagttacctgcgggaaacgcgacggatgatcgcggaactcgacgacaaccacgcacaatacggcggaggaatcttcgaattgttcggccgttatcgagtccctctcaacacaggcttcgtcgaagggcggctcatcgtcgtaacgcccgataccgtcccggtgaagagcgagcggaaagctccctttcaggtgggggacgaaatcgtcgctgtcgaagataaaccggtcgaatattacatggcacaaaccagggaattcatttcctgctccaacgagaacgacgtgctggcagctacggccgatcaaattctgcgcactaaagagaatcggccgctatcgatccgctaccgccgtgacggagtgacgagggacacgttggccgacgtaacaaagatgccaggacatttcggttggaattacctttggaaataccacaagacattctcgatgctcgaagattcgatcgggtatatctgtccgaacaaactctcgaaagaggaggagataccggagatctcaaacggcctgaaaaaaaacagaggattgattatcgatttacgctattatccttcacaagattttaatgaatttgtaagccagtacattgttccggacagtgttaaatatacggtccgatttacttaccccgatcttgcattgccgggcgtattttacgcgagagactattcttatccgacatataaaacggaaaaatacaacgcccctatcattataatggttaatgaagggacgcaaagttacggggaaacatccgtacaaaaaatccaaaataatccatatactataacgatcggttctcaaagcgccggagccaacggcaatatcagcaaatttacgttacctcggggaatactcggcgcattttccgggttagggtggtattatcccgacggatgggtggtgaatcggcagggcgtgaagatcgaccacgaaatacggccgaccctcgaaggtatccgggatggacgggacgaaatgttggaggcagcactgagcctaatcgaagagaagaccgaagaagagtaggcagagccggacacaggatgcgaaacggcgctgcgggtattcaatccgcagcgccgttttgaaatattcgtccccgttccgcccgaacttcggaaattactccaccggttcgtaatcgatcgaggagtcctggtccgtacgttcgatcttcatgattaccgggcggagtccgtcgttgcaggaacagatcgccacgccttccttcgtgatccaatcgccgaaatagaactttccggcgccgtgcgacaaggcgaacacatactgataaaccgccttccacgcttcgtcgcaaaaaccttcgggcttggcatagtcggcataaaaaacctgaccttcacgcatcataggacacctcgtaaagccgggagcggcatactctcgtgccaattcctcgttcagtgtccgttgcaggatcgtaattttacagcgcttcataatatcgtctttcgctcagaacccattctgcggggggactgacttgccgcccgcagacaggcgtttcaaaaatcaagcccgcacctgcgcacccgccttgcgttcgaactgagccgtcagattggccatcgcctgctcgatcatcttgtcggtcagcgtctgggtcttgtcctccagtacgaaactcagggcatacgattttttaccttcgggcagcttatcgccctcataaacatcgaagagcgaaacccgtttgagcaacttgcgttcggccgcgaaagcaatatcacgcagtgcggagaaagtcacctccttgtcgatcagcagcgccaaatcgcgttttacctccgggaacttggaaagctctttggccgtgaccttattcttacgcgtagccttgatcagggccccgaaatccatctccagataataaacgtcctgtttcagatcgaaagccttgcgcagcttcgacgaaacgacacccatttgcaccaactccctggccttgtcgttgagcgagaaggagagtgcatccccgtaaagatcgctgcggagcgattcggacttgagcgtataaaggtcgagcccgaaacgacgcaacagcttctcggcaatcgctcgcagcgtaaagaacgatgcctgctccggtttccggttccacgaaaggggtgcggcgatgccggttacggcgatcgccaggcggaactgctcggaataagccttcagcggctcttccggtgtagcggccgtcgcatcgtaaaagtagcagttgccgaactcgtacagcttcaggtcgccgttgcggtggttggtgttcagttgcacggcttcgagcatattgaacagcagcgtctgtcgcatgacgttcaggtcgttgctgagcggattgagtatcttcacgcaatgctccggcttgtatgatgtaagtccttcgtaataagccgctttcgtcagtgaattggacatgatctccgtaaagccgttagccgtcaggaaatcggcggcgaggttcatcagcttgttccggtcgggtttcggcgcgtaggagagcgccgaattgacgtgcgagggaacagggatgttattgtagccgtagatgcggagaatctcctcgaccaaatcggcctcgcgcgtcacatcgacccgatagggcggcacggccacacgccataggtcaccctcctcggcctcgattttaatgtcgagcgcaccgagaatcgtgcggatcgtatcggcaggaatctctttaccgatcagactattgacatgctttatatcgagttccactttaaacttttcgataggagcggagcagatatccgtaatttcggaggcgatctctcctccggccagctccttcatcagcagggcggcacgcttgagggcatagacctgtatgtcgggatccacgccgcgctcgaagcggaacgaagaatcggtgttcaggccgaagcgcttggccgtcttgcgcacccagaccgggttgaaataggcgctctcgatgaatacgtcggtcgtcgtatcgctcacgccagaatccaacccgccgtaaacgcccgcaatacacatgggtttcgcagccgagcagatcatcaggtcgttggccgtgagcttgcgctctacgccgtcgagcgttatgaacggagtaccttcctcgcaggttctgaccacgatccggccgccgtcgaacttcgctgcatcgaaagcgtgcaggggctgtcccagctcgaaaagcacgaaattggtgatgtccaccaggttgtttttgggggtaatgcccgctgtccgcaggcagttctgcatccattcgggcgaagggcctatcttacaattcttgaccgtaacacccgcatagcgcggtgcggcttcgctgttttccacttgcacgtcgatcttcagatcgtggttatcgacggcgaaagcgctcacgtcgggccattgcagctcgacgggcttgccctggcttttgagataagccgccagatcgcgcgctacgccgatatgcgacgccgcatcgatacggttgggagtcagaccgatgccgatgacatagtcgtcttccagcttcaggtactcccaggccggctggccgactttcgcgtcggccggcagctccatgatgccctcatgcgaagctccgatacccagttcgtcctcggcgcagagcatcccgagcgactccacgccccggatcttgctgcgcttgatcttgaactcctcctcgccgccgttggggtagagcaccgcacccaccgtagcgcaaaggaccttgagaccctgccgacagttgggagcaccgcagacgatctgcaacggagcctcgccgcctacatccaccgtcgtcagatgcagatggtccgaatcgggatgatccgtgcaggtcagcacctcgccgaccacgacgccggcaagtccgccgcggatcgattcgatcttttcgaagctctcgacctccaggccgatatcggtgaggatcgtcgccatttcttcggccgacagatcggttttaaggtagcgtttcagccagttataggagatattcatagtatgtgtaatattttattattgacaaagagtaagcaaaggtataaaaatatcccgattttatccccgcaaaagagcggtaattacgaagacggccagcaccgtgctcgcaatgccgttgagcgtgccgaaagcgatgccgatattccgctgccgtgtcggggtcaccaacaggtgttcggcgacgaggatcagcgtgaaaatcccttcgccgagccagagccaaccgttctggggacaatacgacccgaaccagaaaagtgccgcgacgctcaccacatgcaacagaatactgaacaggagcgacacccgtgccgaaaaacgggccgggatggagtaaaggccgttcttgcggtcgaaatcggcgtcctgcaacgcatagatgatgtcgaagccgccgcaccaggtcatcaccagcagcgccaggatacagggcggccatgcgaaatgccccgtgacggcgatgtacgcccccaccggagcaatacccagccccagaccgagcaccagatgcgccagcgcggtgaaccgtttgcaataactatatatcaatataacgaatagtgccacaggcgataataatccggtaagtaaattgatagtcgaggcggtgacaacgaacagcagcgcattgacgatcacgaaacggagcgctgcccgggcactgatctttccggccggaatttctcggtcggccgtgcggggattggcccgatcgatgcggcggtcggcccagcggttgaagcccatcgcggcgttgcgggcgaagaccatgcagagcaacacctgcaagagcagcaccacccagccgtatctgcccgcacaatccgaaggaatcccctcggtacgcagggcatagacgaagccgatgagggcaaaaggcatggcgaaaatcgtgtgggcgaacttgaccagtccggcatattggcgtatcattgtcgattcgattttatggtcgcaaaagtaatcatttttttcggcagcagaatacggccagggcaagaaatcggcccccggcaacgcctgaaatccattgtttttctccggaaagatattatctttgcacattattatataaggatttcactcgacgatgaaaaacatacgcaatttttgcatcatagctcatatcgaccacggaaaatcgacactggccgaccgtctgttggaaaagaccaatacgctcaaccagcgggaaatgcaggcccaggtcctggacaacatggacttggagcgcgaaaagggcatcaccatcaagagccatgcgatccagatggaatacctggcccgcaacggtgaaaaatacgtgctcaacctgatcgacactccgggccacgtggacttttcctatgaggtatcgcgtgctatcgcctcgtgcgaaggggccttgctggtggtcgatgccacgcagggtatccaggcgcagaccatatcgaacctttacctggctgtcgagcacgacctgaagatcattcccgtactgaacaagatcgacatggactcggcgatgatcgacgaagtgaaggatcaggtagtcgatctgctgggttgtgacccggacgagatcctctgcgcctccggcaaaacgggactgggcgtggaagaggtgctcgaagccatcgtcgagcggattccggagcctcagggcgatgcgaacgctccgttgcaggcattgatcttcgactcggtgttcaaccccttccggggcatcatcgcctatttccgcgtcttcaacggcacgatccgcaagggcgagcatgtcaaattcttcaacacgggcagcgagtacgacgccgacgaggtgggcgtgctgaagctcaagatgcagccccgcgacgaaatccgtgccggggacgtgggctatatctgttcgggtatcaaaacttcgtcggacgtcaaggtgggcgatacgatcacatcggtcgaaaacccttcgacggaggccatcgccggtttcgaggatgtgaaaccgatggtcttcgcgggcgtctatcccgtcgaagccgaccagtacgaagacctgcgggcttcgctcgaaaagttgcagctcaacgatgcctcgctcacgttcgagcccgaaagttcgctggcgctgggcttcggcttccgctgcggatttctcggcctgctgcacatggagatcatccaggaacgcctctaccgcgaattcgacatggacgtcatcacgaccgtcccgaacgtatcctataaaatcaccacgacacagggcgacgtgctcgaggtgcacaacccctcgggcctgcccgaaataaccaaaatcgcctcgatcgaggaaccttatatcctggctcaaatcatcaccaagtcggatttcctaggcaacgtgctcaagctctgcatcgacaagcggggtatcatgaaaaaccagaccttcatcacgcaggatcgcgtggaggtcaatttcgagatgcccctgtcggaaatcgtgttcgacttctacgacaagctcaagagcatttccaagggctacgcctcgttcgactatcaccgcatcgggttccgtccgagcaagctggccaaactggacatcctgctcaacggcgaaccggtcgatgccctttcgtcgctgatctatgccgaccacgcctacgatttcggacgcagaatgtgcgagaagctcaaggagctgatcccgcgccaacagttcgacatcgccatccaggcagccatcggcgccaagatcatcgcccgcgaaacggtcaaggccgtgcgcaaggacgtgacggccaaatgctacggcggcgacatctcccgaaagcgcaagctgctggaaaagcagaaaaagggcaagaaacgcatgcgtcagatcggcaatgtcgaagtaccccagtcggcctttctcgccgtattgaaaatggattagctatgaaaaagacgatcatcgacctgttcgaatcctccgttgaaaaatacggaaagaaaaccttcctgctcgagaagcgtcatcacgcctttcagcccacgacttacgcggaaaccagggaacaggccctggaagtgggggccggattagcttcgctgggcatccgccccaaagacaaggtcgctatcctggccgaaggaagcaacggatggatcatctccgagctgggtatcttctatgccggagcgatcagcgttccgctgtcggtcaaactcgaagagtcgaacgatctgttgttccggctccgccacgccgaggtcaaggcgctgttcgtttcgaaacaacagcttccgaagatccgccgcatccgggcggagctgccggaactcgaacagatcatcgtcctgggacacattccgctcgaaagcggcgaaacggcctacggcatgctcaaacgtctgggccgcgactatttggccgggcataaggaggaatttctcaaaatagggcaggcaatccggaacgacgactacgccacgatcacctacacgtcgggcacgacggccgatccgaaaggcgtcgtcctgacccaccgcaactacacggccaacgtcgaacagtcgctctcgcgcatcgacatcccgtccagctaccgcacgctcatcatcctgccgctggaccactgtttcgcgcacgtggtgggattctacatcatgatcgcctgcggcgccagcgtggcgaccgtacaaataggggcgaccccgatggagacgctcaagaatattccgcagaatatccgcgaagtgaaacccaacttcctgctgtcggtgccggcactggccaaaaatttccgcaaaaacatcgaaacttcgattcgggccaaaggacgtttcaccgaacggttgttcgacttcgcgctccgcacggcctatatctacaatcaggacggctaccacaaaggcaagggctggcggatcctgctggcacccgtcgtgggacttttcgacctcgtactgttccgcaaggtgcgggaggcattcggcggcagcctggagtttttcgtcgggggcggcgcactgctcgattcggagctgcaacgctttttctatgccatcgggatcccgatgttccagggatacggactctcggaagctacacccgtcatttcgaccaattcgcccaagtaccactggcacaagttcggatcgtcgggcaagattctcgaaccgctcgacctgaaaatcctcgacgaagaggggcgagagctgccgcgcggccaaaagggtgaaatcgtcatccggggcgagaacgtcatggccggctactggaaaaatcccgatgcgacggcggcgaccgtccgcaacggctggctccacacgggcgatatgggctatgtgtcggaggatgatttcctctacgtattggggcgcttcaagagcctgctgatcgccagcgacggagagaagtacagccccgaaggaatggaggaggcgatcgttgataaatcgcccttcatcgaccagatcattatctataacaaccaaagtcccttcaccggggcgatcgtcgtacccaatcgcgacgccctgcgccgcgagctcgacgcccgcgatatccgggagggtagagcggctgcggccgccgacatcctcggcgcggagatcgaccgttaccgggccggcggcccctatgccggagaatttcccgagcggtggcttccggcgggactggctatcgtggacgagccattcaccgagcaaaacggactgatcaacagtacgatgaaaatcgtccgcaacaaggtggaagagtatttccgcgaccggatcgactacctctatactccggagggaagggagttgcgaaacgataaaaaccttgcgtcactgcggaaaatggtagaataacctgaaattttaccgcccgaagagttgataaataaaaaaatcggagtaactttgttctccgaatgcgggagtagctcagtggtagagcatcagcttcccaagctgagggtcgcgggttcgagccccgtttcccgctcacgaggtccttttcgaaggaccttttttgttaggcaagattacataatatagaagtaaacgattctggacatcaatgatatgcagaatcgtttcgttttaataccggaacaaagagcgaacagcagcgaaagtatgattatcaggagccgggacggaagataaattacatagcgcaggggacagacttcacaatatatgtttctgcggaacttaccgaggtagcatggcaacggaaaatgtttataccgcaaacagacgtctgggacctttcgatcgacaaaagccgacaaaatgcaaggcattgacaaatgaatcacttacgtcaaactctggcccgttatgcgattatcacatacacgacgtaacaaagtttcagcgatagcaggctgccgaagctataacacacacagaacttacttcttgtcgagccgagatcgcgctccaagcgcacccctgaaagttccaaaaacagtcagccttattttcctttatccatctgcttctccagtaaagaaattacccggttcatctgctcgtcccgctccttgaaactgtcggcctgcttttttattacctcccaagcatccctgggaatcaacacttcatcggagcctgccggtcgcccgacataatacgcctggtcgtttaccaaaagctcattcccgccttccattgccggatagtgaacgacattcagcatcggtccttcaccgttcaacagccaatctttattcaattcgggatagcgggcgaaaattttaccgagtttatcacggctcggttcatgtttcagtttcgacagataggcattcgatagtccgcactcgcgttcgaagcgccccggcttgatgccgctcatcctgcaaaattccattattctgtccttgaccgtcataccaaaagtcgtttataataaaaatcgtatttataaaaataaattatagaaaattccttgtcatatagatttaattcttcgaatattatctatatttgtagtatcaaacagatcgaacgaatagtgttcgaaaaaccgaacgaaaaaaattataacaaatataatataattctttcaataatgcgacgacaagtatataaaaaggtaatcgaaatcgcacccgatctgaaacgacagatcgctatggaaatggggtgcacggtagataccgtgtataatgcgctcaacttgagcaacccgaccacgggtgcacaaccggacaggatccgccgtcgggctatggaattgggcggcaaggagaaccgaaaaatccgctggatcaattattgacgccccaacctctcgtgcgaacgaaaacagccggaaaaaagaggtcgtattacaaaccgcaacgaagtcttccaccacatcgtgcttccgcacaatgctttgcgcgaataacgctcaccgacaaaaaacggggagcaatcgggagaggcggaataagtagaaatacaaagaggaaacgggagattttcccgtttcctctaattttctataaacgccccgccgacggaaacttacctccaaatccgaacgcatagccggaagtatgaattaaaaaaacgaacatccttccgaaatttttcctatatttgcatcatacataagacacaagaggggtgccttcgtcgggaaagaccggaaaggctgagatcataccctatgaacctgaagcggttaggaccgccggaggaacttgttcatagaccgtaattttctcatcgagacatctcccgcaattacggtaaatcatggaagtattcatcaatcactcacccgtcgaaaccgacgctgcaacgacgctcgccgaactgctgatgcaggagggtatcgccgccgacggaatcgccgcagcgatcgacaacaaggtcgttccccgcagcgaatggccgacgacccatttgcaggccggagcgaaaatcaccgtcatacgcgccgtgtgcggaggatgatgcgcatcatcgtcatcaccgacacgccgttcgctgcgtcggaagcggagtcgatccggattctgctctcggaaggagccgatcgggtgcatctgcgcaaaccgcaatcggccgagaacgacatgcgtcgcttgatcgaagcgcttccgcccgaactatatcctcgcctgactttgcaggatcatctgtatctggccggggagtacggcatcggaggagtgcacctgaacgcccgcaacccggagatccccgccggattcggaggcctggtaagccgttcgtgccattcgttcgaggagctcgcatcgcacccgacggaagactacctttttctcagcccgatttacgacagcatctccaaaaccggctaccgagcggggtatgcaccggacgaactccgggaggcattcgtgcagggcatcatcaatccgcgcatcgcagcgctcggcggcatccggccggaacacctgcccgcgttacaggagtacggattcgggggagcggccttgctcgggtacatctggcagagcgctacgcccggagaactggtgcggcgcatgctggaaatacgaaaattcaaccgataaaccggcggagcgcaccggaatcggtccgataaaaatactttagtgtgcctcatgggaggcgcagcgtcccaaaatcccctccgaggaggaggggcggggaaggtcggaattacagaatcggccacgagccgcgataatcgaccgccggttcgacgcgacaaacgtcagacaacggtacattaaataaatatacaactactaaaaatatgttacagttcattacccaccataccgaccgttacgacgagatcgccggcacccgggccgtactcgaaggaggctgccgctgggtgcagctccgcatgaaagacactccggcggaagaggtgctgcgcatcggacgtgaaatcgaaaagctgtgccgggagtacggtgcgaaattcatcctcgacgatcacgtggaactcgtccgcgaactgaatgccgacggcgtgcatctgggcaagctcgacatgcccgtagcggaagcccgccgcctgctggggccggaatacctgatcggagcgacggccaacaccttcgaagacatcgaacggggggcagggcagggcgccgactacatcggcctcggaccgttccgtttcacgcagaccaaacgcaacttgagtcccgtgctcggactcgaaggctaccgcacgattatggagcgctgccgcaatgccggcatcgcgctgcccgtcgtcgctatcgggggcatcacggcagccgacgtggaaaatattctcgcaacgggagtgaccggaatagcgctctcgggcgcactgctgcaagcggaaaacaccctcgaagaaactcaacgaataattaatataataaaccgaactaaacaatgagtgaattagttatcggcggacggacgttccgttcgcgcctgttcgtaggaacgggaaaattcagctccaacgaactgatggcccgcgcaatcgccgcttcggaatcggagatggtcaccgtagcaatgaagcgcatcgacatgaataacccgcaggacgacatgctcgtgcatgtacgccgtccggagattcaactgctgcccaatacgtcgggtgtacgcgacgctgaggaagccgtgctcgcggcacagctcgcccgcgaagccttcggcacgaacttcatcaagctggagatccatcccgatcccaaatacctgctgcccgatccggtcgaaacgctcaaggcaaccgaacagttggctaaaatgggcttcgtggtactgccgtacattcaggccgatccggtgctttgcaagcgactcgaagaggcgggcgccgcgaccgtaatgccgctggcggcaccgatcggcaccaacaagggactggttacgcgcgacctgctggccatcatcatcgaacagagcaacgtcccggtcatcgtggacgcaggattaggcgccccgtcccatgcggcggcggcgatggagatgggtgccgacgccgtactcgtgaatacggccatcgccgtcgcaggcgatcccgtgcgcatggcccgcgccttcgcccaggccgtcgttgcggggcgcgaagcctacgaagccggactcggagcacaggcacagtgcgccgaagcgtcgagccctctcaccgcatttctcgactaattccgccgcgctatgttttcagaagaattagccaaatacgactgggaggagacgacccggcaaattcagcacaaacgaccggcagacgtagagacggcgctcggcaaggaacacctgaccctcgacgacttcatggcgctcatctcacctgcagcggccgcctacctggaaccgatggcccggctgagccgccgatacacacaggaacggttcggcaagactatttcgatgtatattccgatgtatatcaccaactcgtgcacgaactcctgcatctactgcggattcaaccatcataacaaattcgaccgcgtgatcctcacgatggaacagatcgaagacgagtgcaaggcgatccgggcactcggaccgttcgaaaacctgctgctcgtaacgggagaaaatccccgggcagcgggcgtggattacatcgaacaggcgctcaaggtctgccgtccctatttcaacaacctcaccatcgaggtaatgccgttggcgagcgaggattactaccgcctgacccaatccggactcaacggggtggtctgctttcaggagacctacaaccgcgccaactacaacatctaccacccggcggggatgaaatccaaattcgaatggcgcgtgaacggcttcgaccgcatggggcaggccggggtgcacaagatcggcatgggcgtactgatcggcctcgaagagtggcgcacggacgtgacgatgatggccctgcatctgcaatacctgcgcaagcactactggaaaacgcgctacagcgtcaatttcccgcgcatgtgtccgtcggaagggcattttcagccgaatgtggtgatgaccgaccgggagctggcccaactcactttcgccttccgcatcttcgatcacgacgtggacatctccttctcgacccgtgaaaaaccctcgttccgcaaccacatcgccacgctcggagcgacatcgatgagcgccggatcgaaaaccgatccgggcggctaccatacctatccccagtccctcgaacagttctccgtcagcgacgaacgcacaccggcccaggtcgaagccgacatccgccgcgaagggtacgaagtcgtctggaaagactgggacaaaatcttcgactgacgatggaggaacgttacgcacggcagacgatgctgccggaaataggggagcaggggcagcgcaggttgtcagaggcttcggtgctgatcgtcggcatcggcgggctcggctcggccgcagccctctacctgacgggagctggcgtgggacgcatcggactggccgatgcggatacggtgagcaagagcaacctccaacggcaggtactctacaccgaacgacagatcggaatgcccaagagcgctgcggcccgggagcggctcgcggcgctctcgtcccacaccgcgttcgaatgccggccggaaggaattaccccggaaaacgcacggcctattctggacggttacgacctgatactcgactgctgcgacaactttccgacccgttacctgctcgacgacctatgtgccgcctgccgaaaaccctgggtgcacggctcgatcggggagttttacggtcaggtgaccgttttcaacggccggaaaggccgtcgttaccgcgatctctatcccgaccggaaggcactttgcgcccgtccccggatcacgcagggcgtactcggcacagtgccgggcgtcatcggaacgctgcaagcttccgaggcgatcaaatacctctgcggcttcggcgagccgctcgacgggcgactgttcacgatcgacctgcgtaccctgcaaacccaaatcatagattattaacctgcaaaaaacacaaaaagaacctatgggaaaaggatttgacgaatatgctccggcttacgacgcctggttcctcgaaaaccgcaacgtactctactcggaaatcaatctggtggcccacgtgctgaaaaatccggggcggacgctctcggtcggttgcggcagcggactcttcgaaacgattctggccaaagagtacggtatcacgatcaccgacggcatcgaaccgtcggaaggaatggccgaaatcgcccgcaagcgggggatgaaggtgacgatctcgaccgccgaagaagccgatttcggctgcggcgactacgatacgattctcttcaacggtacccccagctacatcaccgatctggaaagcgtcgtccgcaaagcctacgacgccctgcccgaaggcggccggatcatcctgatcgacgttccgaaagagagcacctacggtgtgctgtacaacctggccaaagccctcggcacgtgggatcatccgctgctcgcagggacctatcccgagaatccctatccgatcgaattcgtccgggtcgccaactggcgcacgacggccgagaagatcgagctgctcgaaaaagccggattccgggatctccgcttcgcccagaccctcaccacgcacccgctctactcgaaccggcaggaagagcagccgtcggaagggtacgaaaagggagattacgtagccgttaccgcctgcaaataaaccgacattatgaaaaaatggagcgaagaggcctgggatgttgctcggcctacctacctgaaaatcatcgaacatccgttcgtcgaagagcttgcccggggtacgttggccgccgacaagttcctgttctacctgcggcaggattcgctgtatctggcgcattactccagggtattgacccacatcgcttcccgtcttaccgagaaggagcacatcgcggctttcatccgcttcgcttcggacggcatagaggtcgaggaggcgctgcacggctccttcctgaaaggcgacgtaccggctcccgaagagatcagcccgacatgcctgctctacacctcggtactgcaagcccaggccacagccccggtcgaagtggaagccgctgccgtgcttccctgcttctgggtctatcagcaggtcgggcggcagatcatcgcccggcagcagggaagtgggaatccctatgcacagtggatcgagacctacgccgatccctccttcaccgaagcgacttcgcaggctatcggaatctgcgacgcactggccgaaaaaaccgggccggaaacccggcgccggatgaccgacatcttcctgcgctgtaccaagatggagtggctgttctgggacagcgcctggtatctggaaagttggaaaatataaaaagcgttcattcaagtaaatgtgccaataatctgattaacaaaatcaattatgaaaaaacactataagcgggtcctgacgatcgccggaagcgatccgagcggcggagcaggcattcaggccgacctgaaaaccttctcggcctgcggttgttacgggatgtcggccatcgtagccgtcgtggatgaaaatacggtaggcgtcacgggcgtacacccggtgcctgtggatttcgtcaccggccaaatccggtcggtgctggatgacatcggcgccgacgccgttaagatcggtatgctgcactcatcggaacttatccgggccgtgcgggaaactttggccgcttacgacatccgcaacatcgtcctcgatccggtgatggtcgccacctccggcgatcggctcctgcaggaagaagcgatcgccacgctccaagaagagctggtaccgtttgtgcgggtcatcactccgaatatccccgaagcggagattctgctcggacgcaagatcgccggacaggaggagctgccgcaggtagcacgcgaactctccttcggacgcaaagtttccgtgttgctcaaagccggacacctgcacgataccgagcttatcgacgtattctacaacgccgaaaccgacaaagcgacccctctgcgctccatgcggctcgacacgcctaacacgcacggtacgggctgcacgctctcctcggccgtagcagcttttctcgcccatggattgcctctggacgaagcggtcgtctgcgccaaggagtacatcaatgccgcaatcatcgccggagccgaatacgaaatcggcaagggtcacggccctgtgcaccatttcttcaacttctgggaataagagcggggcagtacaccgaaacggcggaaatattgtgcgaagtggggatattttatgaaaatatccctatttttgcttattcaaacaatgtacaaaacacgaagagatatgtcaatggttttcaaattccgaatgttgagcgatgaaaacgaccatttcgtccgcgactacgaggtgccgtacgatatgacgctgctcgggtttcatgagttcatcacgcgttcgcttggctatgaagaggggatgtcttcgttcttcacggccgacaagcagtggaaccggttgcgcgaattcacgctgatggacatgggagataattcagaggacgctcctctgccgatggcggacataacgctcggtcagttgattcacaacaatcgcgaccggctgatctaccagttcgacctcatgggcgaccgggcgtactacctcgaactgaccgaagccaaaaagccggagcaagggatggaatatccgcgcgtagctttcgagcacgccccggctcccgatcagttcgatcccgacgccaatgagtcggaaggctctattttcgaggagatgatgggcgacttcagttcgttcgaaggcgacgacaattacagcgacgatgactgacaagcggctcgtcgttttggtcggcgcaacggggtcgggtaaaacggatctgagcattcgcctggcaaagcattaccgggcgccgatcctttcgaccgattcccggcaagtgtataggggaatgccgatcggtacagcacagcccacgaatgaacaattaaaagccattgaacaccattttattgccacactcgacatacagcaggacttcaactgcgggcaatacgaagtgcaggcgctcgaactgcttcggcaactgttcgtacggcacgatacggtaatcgcggtcggaggatcgggattgtatgtgaaggctctttgcgaggggatggacgacctgccggaagccgacccggaattgcggagaacactccgacagcgacttgcgaatgaaggcctcgaatcgctgggcgaagagttgaagcggctcgatccggtttattatgcgcaggtcgatcggagcaatcctgcacgtgtcgtgcgggcattggaggtatgtctgcaaaccggacgtccctattcggaacagcggacaaagccccgacgcgaacggaacttccgaatccttaaaatcggaaccgacgttccccgtgccgaactctacgggcgaatcgatcgccgcgtggacgaaatgctggcagaaggactggaggtcgaagcccgtcggctctatccctacaaacacctgaacgccctgcaaacggtagggtataaggagttgttcgcctacttcgacggacgatgcagccgcgacgaggcagtggagcttatcaaacgaaacacgcgccgctacgccaaacggcagctcacctggttccgccgcgacccggaaatcttctggaccccacccggcgacactgataaaatcatagcatatatcgacgggacgttgtaaatcagtaaatttttgttacttttgtcccgtctttttccgaagacggctgctcggatggtggaataggtagacacgccggacttaaaatcctgtggccagcaatggccgtgcgggttcgattcccgctccgagtacggaccgaccgctaatcgcaagattagcggtcggttttattttcacagaccacaatctgacgtcatacagagagcgatacgttttcgaccgggtttcaactttcaaacgattgccgaccgtacgataaattttcggacaacaacaaccttgttttaacttttaataaggaaaagcgatatactaccaacctatatctaccgggaaatagattttagcccttgccatatttatttagaagcaagaaatttgcaattaaaaatatttagctatctttgccacacaatccgacaaccgatcatccgatcggtttcatcacccacttaatatatccaacattttattcggacaaatatgcaagaccttaaagcacttgaaggcaagagtctggctgaattgcgtgaaataggcaaggcactgggaatccctcaccttatgatgaaaaaaaaggaccttatcgaaaaaattctgaatttcacgcaggacggaggcgttgcggataccgaaacgcaacaaagccccgccgaagctcccaagaaaacccgtcggccgcgtattgccaagacggaatccactcaggcctccgtcgaaatacgggagcaacccgccgcacagaccacgacgacaccgactcccgcagcgccaaaagagggcggtaaacgccgtggccgtccctcccgcaaggaacaggccgccccttcattcgcaggcacagatacttccaaaccagagataaaaaaaatcgccctggacggcgaaacgtgtccaggaatgcacgaggaaccgcagacactccccacaacgcatccaacggaagagatcattaccaaagacgattttgcgggagaaatcgccggtgaaggcgttctggaggtaatgccggacggctacgggttcctgcgctcggcagactacaactacctgaactccccggacgacatctacgtttctccttcgcagatcaagctcttcggactgaaggcgggcgacacggtgaccggcacgatccgcccgcccaaagagggcgagaagtatttcccgctggtgcgcgtgacggacatcaacggactggaaccggagtacatccgcgatcgcgtacagttcgaattcatgaccccgcttttcccgagcgaaaaattctgtctcacgggcaacggccacaacaacctctcgtgccgcatcgtggatctcttctcgccgatcggcaaggggcagcgcgccctgatcgtcgcccagcccaagaccggtaaaacggtgctcatgcagtcgatcgccaacgccatcgccgacaaccatccggaagtctatatgatcgtactgctgatcgacgagcgtccggaggaggtaaccgaaatggcacgcaacgtaaaggccgaagtcgtggcttcgaccttcgacgaacaggcttcgcgtcacgtcaaagtcgccgaaatggtactcgagaaagccaagcgcatggtcgaatgcggacacgacgtagtgatcttcctcgattcgatcacccgcctggcacgcgcctacaactcggtgcagcccgcttcgggcaaggtgctctcgggcggtgtggacgccaatgcgctgcacaaaccgaagcgtttcttcggcgcagcccgcaatacggaggagaaaggctcgctgacgatcatcgccacggccctgatcgacaccggttcgaagatggacgaggtgatcttcgaagagttcaagggtacgggcaacatggagcttcagctcgatcgcaaactggccaacaaacgtatctatccggccgtcgatgtaatcgcgtcgggaacccgccgcgaagacctgctgctgtcgcgcgaagtgatgaaccgcacgtggattctgcgcaagtatctctcggacatgaccccggtggaagcgatggagttcctgcaaaaacagatgaacctcacggacaacaacgaggagtttctcgccacgatgaaccattaaatcctataaaactatgcttcggacgctattcatctcgctcttatgcctgctgggaacgaccagggcactggcctggggacaaaaagggcacgacgtagtcgcctacatcgccgaatgcaacctcacgcccgaggccgcagagaaaatcgacaagatcctcggcggagcctcgatggtatattgggccaactggctcgactcggcgagccacacgccggagtatgcctacaccgcgacctggcattatgccaatgtcgatgaaggtttcacttacgagaccatgacgaagaatccggacggggacatcgtcgaggccatcgaccggatcgtggcggagcttaaaaacggtcagctcgacccggcacaggagcaactctacctgaaaatgctgatacacttggtcggtgacctgcaccagccgatgcacacggggcacttgagcgaccggggcggcaactccgttcccgtacggttcttcggtcgggagagcaatctccatgcagtttgggacagctccctgcccgaagcggcccacaagtggagctatacggagtggcaaaaccagctcgatcgcctcacagaagaggaggtggcccgaatccaatccggcacaccgttcgactggttcgaggagagcaatgcgatctgtcgggagatatacgttgcaacacccgaaggcagcgatctttcctacgactacatcgctaagtatgccccggtaatcgagcggcagttgctgcgtggaggacaccgcctggcaggtctgctgaacgagatatacggataacggaaacatcaacagaaaaatcccggagttccccaccaagaactccgggatttttctgttttcagaccgattacaatccgtacagaaactccatcacatcgaccgcatccggatagtccgaaagtgtaggctgctgtgatcggcccaaaggaacccgacggctgtggtcgatacagttggaaaccacgcattgtaactccgcatcgtgtttccgaagccaagctgcgacctgggagagatcgtcgtattcgaccacggacacctcgctcaaagcctgcgaaaattccgactggcggatcaacagcgcgaatcccaaatcaaaaaacggatcgccgcacatttcacgcagggccttgcgctgacgataattattcaggtatttggggttcattcgtcgagaagcaaaacgaagggagatacctcgaggtacgaaaattagagaaacgttccgacatcccaagcccgaataggagaagatatcgtcggacagagcctccagttgcccggacgtttcccgcccgttcaagaccgcgaccgaatggcgattaccgcgcaaaagagttctgaccccggcatacaagctgcgaaaataccgattggcattatcgctgccggtggcaatcgcggcatcgaaaggtgtagccccgtcataaactgcgacagggacacccggctcgatctttttcagttggtcgatgacgaaactcatcagcaccgcatctttgctcgacattttcaccaggcaacgatgtccggccgtaacgacacacaacaaatcgaaaaaaccgaccagcggaatattgccggccatgacgaccagaacggtacgggacggcagggtagcggggcgctcgtagcacgccagccaacgctcgatcttatcacgcgataggaactcctcgcggatcgaccgcacggcatcgacaatctcttccggctcgaaccaatcgttcttctggcaggcccgcgcgataacctcacggctcgcagcatcctgtccgaacgaagagaggcgtgcacccaattccgcccatatatctacgggagtcttcatcggcacaaagatagtataagccgcgtgcaaaaacaagtctgcctgaatcatactgcagccttgacaaagagaggcagaaatttggtttatcgaattttttcgttacctttgctcccgcatttgcggaaatagctcagttggtagagcacaaccttgccaaggttggggtcgcgagttcgagtctcgttttccgctccaagcaaaaagctgataatcaaacgattatcagctttttcatttctgctgactgatgttacagaggccctttctgtgacacaaaataccctgaaatcgtggtttgtgatacagagtgtgatacataaaatcgtgtaacacacgaatcgcattttgttgcttgcgtaatccgtaaagattatgacaatcaacgttgtatgtcgcaaagacgctatcaacagaaaccatttagcccctcttgctcttgtttttacccatgaccgccgccgtaagttcgtaggattgggcatatccgttgcgctggagcattgggattttgagaaacaacaacctaccaccgactgccccgatggagcagaaatacagtttcaaatcacctccaaaatccgtgaatacgaaaagaaaatcaaaaagttggaggtgctggaaatccctgttacgttcgataatctttttgaacagaacggcaaacgaatcaactgcaccgtaggggactttttcaaacaggttatcgaacgcttggaaaaagttgaaaagtacggttccgccagcaaacataaggtaacacttgcccttatgtcgcaattccgctcggtcaatatgcactttgaggaattggatttgacttatttaagggaatttgaaatcttcctgcgtcaaaggggtaatgtcaataacagccttgctaccaagttcagcgtactgaaagcagtctataacaaggcggtttcagagggcgtattcgtgcctaaatcgaatcctttccagcaattcaaagtgggtagcctatggacgaatacccgcaagcgggccatcacgaaagaggacatccacaaactgattgagttggatttatcggacagggacttttacacccaacttgccaaagacatctttctgttctcttatttcatggctggaatcaatttcaaagacattgccctgctgacttatggagacatcgacaatggacgcatctactatgcaagacgcaagacgggtaagatgatgaactgctgtcttacggaacaggcacaggaaatcatcgacaagtaccacaccgaccaaatggaggaggactatatctttccaatcctcgaccgcaacgtacacacgaccgagaagcaaatcttagaacgtgttaagaaaacgttgaagcacatcaataaacgcctgcacgaattgagtgagaaaataggactgcatacgccattaacaacctatgtagcaagacatattatttcttcttactcattgaaaacaaagaatttacaaagattttcagcttaacaggtaacgatttggaaaccagcgagcttctccattctgcaatgttctgcactaatcaaaagaacgcttttctcattcgcaaaagtaatgtttttcttttttgctaccaaaacaatttcattgaaaaacggagaaaatcagacttttaaaaataattgcaaatataatttcttattctttctcttgaagcagtattgaatttaggcttccagtatccacatatttgccaatagcacctcatcaaaacacaaataatttgttaagtcatgtaatatagcctaaagtaaatgatgtattttctaaatggaatctttcgccattgcgaatgaataataacatttagaattatgatttacggatacattagagttagtagcgataaacagacggtagaaaatcagagatttgaaatcaacaacttctgtgagagagaaaacatcaaaattgatggttggatagaagaaactatcagtggtacaaaagcttataacaaaagacagctcggaacactattaagacgagtacaaaaagatgatttaataatatgtgcagaattatctcgtcttgggcgtaatttgtttatgataatggaaatactaaatatctgcatgacaaaggaatgtcggatgtggactattaaagataattacaagctcggcgaagatatacaaagtaaagtattggcttttgcattcggattgtctgcagagatagaacgtaaccttatctctcagcgaacaaaggaagctttagcacgaaaaaaagcggaaggtgttatacttggacgtccgaaaggaaagaaaaacgctcctgacaagtacaaactatcgggtaaggaaaaccttattcgtgaattattacaagtgggtgtatctaaacgcaaaatagctaaaatatgtaaagttgatagaaatacattatctcgtttcatcaatgataggattgaagcataaaattgagcgtttaatgaagaagaaaccatagcatggatacaaaagcaactccaacgatataaggattatggattcggattgtggagcgtattacttaaagataccgacgaaatgataggacaatgcggtattactatgcaggaatacaagacggcgcaagttcccgaaatcggctacttgttggctcataaatattggcataaaggttatgcagttgaagccgcaacagcttgtcgggagtatgggtttaatacgctgaaatttgatgaattatattcaattatcagagatactaacattgcatcgcaaaaagtggcacttcgtaatggtatgaatccgattgattctattgttaaacactatcgtggagttgatatgccccatttggtatattgtgtaagaaaaggttaaattcaaattgacattgactgcatattgttttttgattggaatattgtagttttgaatatttgttctaactttgcatttagaagagttatttgcagcatagcaccgcaaaatactgaaattcgcacagttgccaaattgttacttctatttctcaaataattcgctaaaagtttattcccaatcgattaagtcaaactgataaaaaatcttaaacaatttgcagtttaaaatactgttcgtaaatttgcgaacataaaaataggaagactatggaatccaagaaatatacattggaacaagagcagatagcccgttttgcaaaagcaatgggacatccggcaagaatggctattcttgaatttttagccaagcaggattgctgttttttcggagatattcacgaagaactccccattgcgaaagcgacggtttcacaacatctgaaagaactaaaagagtcggggttgatacaaggggaaatagaaacgccgaaagtaaaatattgtatcaatcgagagaattggaaaatagcttctatgcttttttctaaattcttcgggcaatgtatatgcaaaaaggaaagttgttgcgaatagcgacaatttttttagaatcaatattcgtagttttgcgaataacaaacataaataacaaccaataaaaacaaatgtgtatgaacagattgattttagccttgattatctgctgcggattgactgcttgcgataacaatgggacaaagaagagtgcttctaccgatgtagagcaagcacaacaattggagcagaaagaccatgtggaggtgttgtattttcatggtaaacagcggtgcgccacctgtatggcaatagaaaagaacgccaaagaagtggtagaggtacaatttgccaacgaattgaaaaacggaactctcgtttttagaactattgacatttccgatccgaagaacgaaaccatcgccgaaaaatacgaggttacatggtcttcacttttcgttagcaaatggaaagatggtaaagaaacgtatgagaatctaaccgaatatgcctttgccaatgcccgtaccgctcccgacacgttcaagaacggaataactgaaaaagtccgtaccttattgaaataaagtcctatggaatggttacagacattattagacaacagcacaactcctgcacttacggctttgcttttgggattgcttacggcagtttctccttgtccgttggctacgaatatcgcagctatcggatttataggtaaagacattgaaaatcgccgtcggattttcctcaatggcttactatacacgcttggtcgtgtaattgcttatacattattggggatcgtattgatactgatacttaaagagggttcaagccttttcggtattcagaagttcatcggcaaatacggagaactcgtactcggccctgccttgcttttgataggtttgttcatattgttcggaggtaaactgaaattaccctctttcggtttcaagggaaatggagaaggtttggcccgtaaaggtggatgtggagcatttctgctcggcatgttgttcgctatggcattttgtcccaccagcggagttttctacttcggcatgctgattcccatgtcggcaacaactgccgcaggttatctgctgcccgtcctttttgccgtagctaccgcattgcccgttttgacagtagcttggatattggcgttcagtgtacagcatatcggcagtttttatggcaaaatgcagaatgtacagaaatggctgaatagaattgtcggaggcgtattcacaattatcggcatatattattgtgtaatgatgtatttataaaaagatagaaatatggaaatcaaagttttgggaacgggttgcgccaaatgcaagacaacctatcagacaatcgagaaagtaattagcgagaacaatctcgacgtgacactcacgaaagtagaggatattgtggaaatactcaattccggcattatggctactcctgcagttgcggtgaatggagtggttaaaatcaaaggacacgttccatccgaaaaagaggtaaaacaattactcggtatttaagatgtagttatggatactaaaaaagagttgaaaatcctcttttggatgattgtagtttttgtagccgtatttttcatgccactcggcagcgagcgattcatgacggctgtcgatgcaacctttgaccttgccaaatggtatgcgcaggaacacgtcgtgttatgcctgcttcccgcctttttcattgcaggcgtaatcgccgtgttcgtcagtcaaggttcggttcttaaatatttcggagcaaatgccaagaagtggttatcatatacggtagctgctgtttcgggcggcatattggcagtctgctcctgcacgattctgccgttgtttacgagtatttacaaacggggcgcaggattaggcccagccatagcctttctctattccggcccggctatcagtattttatccatcatcttgacagcccgtattttaggtatagagatgggtattgcacgaacggttggagctatcggattctccgtagtgataggtcttgctatggcatttattttccgaaaggaagagaaagccaaacaagaggagcagatgaatatcgttccgccaccggaaaaacgcccgatgtggcagacgtcgtttcacttttttacgttggtgctgattctcgtctttgcaaattggggtgcgccctctgcctctgacaaagatttgtggactttaatcttctcttataaatggtatattacgggaatctttgctctaatgctctgttggtcgcttatccgaatattgaatttacgtccgttatgggtaggtgtcggaaccgtggcaacgattgtgtctgttttccttgcagatgcccttattgttaatgctaaattagtaccgctcgttccgatggttgtgggtatagcttcgctttccatcatcctgctgtttgataaacgaaacgaggaaaatagagaatgggcattgtcatcatggggatttgccaagcagatattacccttgctggccgtcggcgtagtgacagccggatttcttttgggttcgacacatgacgatacgtctattgccggagtcatccctaacgagtggattgagtgggctgtcggtggaaattcgctgctatccaacttcttcgcaagtttcacgggagcattcatgtattttgccaccctgaccgaagtgccgataattcaagagttgttggcttcgggcatgggcaaaggccctgcacttgcattgttgctggccggcccgtcgttgtcgttacctaatatgttggtaattcaaggtgttatggggacgaagaaaaccgttgtttatgtagctttggttatcattatggcaacaatatcgggttttatatttggaaatttcttttaaatttccaaatatatcgttaaacagacacgagcgatgatattttgttcgtgtctgttttgcgtattcaaataattgatttatatttgtattcagaaagagttatttgacagcatcgtaacgcaaaacgctgaaattcgcacggtttctaaatcgttacctctatttctcaaatactccgctaaaagtttattcttcaatcggttaagtcaaaccgataaaaatctaaaataaatatttcataaaaaaggcaatacaaaatcactatttatatataatgtacttcttcacctgcggccaaccccgaagaaaaacagacagacatgttaccggagagaaagagaaaagcggcaaaaaagagagggtacgacgtaagaacagattcccgcctccgccataacaattcgacgcggagtatccccgcgcatatccggagctacgacaacaacggccggagcggggctgtaacaccctcgaacacggagccgtaacaaaagacccgattacaggctatacattacatcgggaccagaaacggtcatagcaaagaatccgaccaatatgatcggactccaatatttttcgcaaagacaatagagatgaattacatatccatcccgaaccctacacttgcggcagaacagtcgaagcggtggtaaatatatcgaccgaagttcccgcatcttatccgcagcacttcacccgtctgttcaagaaaatcacaggccttacccccaacgaataccggtcggcggaacatccggcgtcgtagccgcctgcattcaatcgaaaaatagcgctgcaacccgactttgcagcgctatttttatccgtaatcccgaaatttcaaaaacaggctttgcatccgatatccgtacatcatcgtacaaaacctcgaaaagtgaccaagctgcatagccgcagcttcaggaaaccgcttttccgaatatcacccgttttcgaccgttcaccgtaacgcgttacaggaacggaaaattcgtcaattcgagatcaaaattatccaatccaagacttttccgccggacaaaagagaacatctaacaggaaaaaggttatctttgtggccggaaaaaagaatcggaatgaccgggaaaatcggatactttttattcgccttgctggtactgacgacaggaacgctctgccgccagcaacttccggtgcaatacgcctccggcggcgattccgtcggcagcctgacgcagcacgttccgcctcaggaaaagagcggcctgcactatttccaccattcgttcatcgcgtccgaaaccgtaagcgaggtcatcgcaccgatgctgcatataaactgcagacaactcgcatcagcgactccttctctccggccttcggaaaaaagtccgctcccttgcagcaatcgtccggcgaatccccatcccgacgcggtggattactacgtcttttcgctgggcaaaatccggatttgaccgcttcgattgcccccatgcgcatcttccgaccgaagaggcgcaccactcttgtttaaccgaatttgcccgaaaaaaacaactctttacagtatatgtatttcgtactactaatggtcgtaatcctgaccgccatcggactggtggcgatcgctctgggagtggcccgcgcgatctcgccccgttcgtacaacccgcagaaaggcgaggcgtacgagtgcggcattcccacgcgcggcaagtcgtggatgcagttcaaagtagggtactacctctttgcgatcctgttcctgatgttcgacgtcgaaacggtattcctcttcgcgtgggccgtcgtggtgcaggagatcggcgtcttcggccttgtcagcgccctgttcttcctgttgatacttacgtttggcctggcctacgcctggcggaaaggagccttggaatggaagtaagaaaaccgaaaatcaagtcgatgaaatacgaagatttcaccgacaacgaatacctcgagaagatgatcgaggagttgcgtgccaacggcacgaacgtcgtcatgggctgcctggacgaagttatcaactggggccgcagcaacagcctctggccgcttacgttcgccacgagctgctgcggtatcgaatttatggcggtcggtgccgcacgctacgattttgcccgcttcgggtttgaagtagcccgcgccagcccgcgccaggccgacttcatcatggtcgccggcacgatcacgcacaagatggcgccggtgctgcgccgtctgtacgaccagatggccgaccccaagtatgtgatcgctacgggaagctgcgccgtaagcggcggcccgttcaagaaatcctatcacgtagtgaacggcgtggacaagatcctgcccgtcgatgtctatatccccggctgtccgccccgtcccgaagcgatgctttacggtatgatgcagctgcagcgtaaagtcaagctacaaaaattcttcggcgacgtcaatcggcagatcgacaagaaagagtacgaaaaacgactccgcgaggacctcacagcggagcgtcccgaactgaatgtggaacccgaagagaagaaaaacgtatgaacctgcaagagataattacggcaaaagtacccggggctgtctatacggaggccggcgacgggatgttcaccatcccggtcgaacaattccacgacctggcccggtacctgcacgacgatccggcgttgcgcttcgatttcctgcgcagcctgacgggtatggactggggcgaagagggactgggtgccgtctatcacctcgaatcgaccgcgacgggagaaaacgtcgtactgaaagtcctcaccccgagccgcgagcaatgcggtctgccgacggtcagcgacatctggaagggggccgagttgaacgagcgcgaagtgttcgacttcttcggtatcggcttcatcaaccatcccgacatgcggcgcctctacctgcgcgacgactgggtggggtatccgcttcgcaaggactacgaccagagcggggaaaccaatccgctccgtatgaccaacgaagtggcgcacgacagttcgccgagctacgagctccagcccgacggcagcatcatccgccgccgcaacgtgctcttcgaggaggacgagtacgtcatcaacatcggtcctcagcacccggccacgcacggcgtgctccgcttccgcgtatcgctcgaaggcgaaatcatcaaaaagctcgacgtacactgcggctacatccaccggggcatcgaaaagctgtgcgaaagcttgacttatccccagacgctcgctcttaccgaccgtctggattacctcggcgcttcgcagaaccgccatgcactctgcatgtgcatcgaaaagggactcggcgtggaggtttccgagcgcgtacagtacatccgcaccatcatggatgaattgcagcgtatcgattcgcacctgctcttcttctcctgcctctgtatggatatgggtgcgctgacggccttcttctacggtttccgcgaccgcgagaaggtactcgacatcctcgaacaaaccaccggcggacgcctgatccaagcctacaacaccatcggcggcgtacaggcggacatccatccagagttcgtaaaaaaggtcaaagaactgatcaaatacctgcgtcccgtcctgaaggagtatcacgaagtcttcaccggcaacgttatcgcccagcagcgtctgaaaggcacgggcatactgacgcgcgaagacgccatttcgttcggtgctacgggcggcacgggccgtgcatcgggctgggcctgcgacgtgcgcaagcggcatccctatgccatgtacggcaaagtggatttccgtgaggtactcttcaccgagggcgactgcttcgcccgctatatggtccgcatggaggagatcctggaaagcctgcgcatcatcgagcagcttatcgacaatatccccgagggtgaatatcaacttaagatgaaacccgtaatacgtgttcccgaaggaagttactatgcagccgtagaaggcagccgcggagaattcggcgtctatctcgaaagccggggcgacaaatcgccgtaccgcctgaaattccgttcgacgggcctgccgctcgtttcgtgtatggacactattacgcggggtgcaaagatcgccgacctgattgccatcggaggtacgctcgactacgtggttccggatatagaccgttaaattaacagatcagataaaacagatcaatatgtttgatttcagcatagtaacaagttgggtacatgaactgctcacttctttcatgccgctcggactggcgattttcatcgaatgcgtgatcgtcgggctctgcatcctgttgatgtacgtagtggtggcgatcctgatgatcttcatggaacgtaaggtctgcgctgcgttccaatgccgtctgggtcccatgcgcgtcgggccctggggtactcttcaggtcttcgccgacgtattcaagatgctcaccaaggagatcatcacgatccggcgctcggacaagttcctctacaacctcgcaccgtacatcgtcatcctcgcctcggtactggcgttctcctgcctgcctttcaataagggtatggagattttggacttcaacgtgggcgtcttcttcatgatggccgcctcgtcgatcggtatcgtgggcatcctgctggcagggtggagcagcaacaacaagtactcgctcatcggcgccatgcgaagcggtgcacagatgatttcatacgagctttcgatcggactctcgatcctcacgatcgtcgtactgaccgatacgatgcagttctccgagatcgtcgcccgacaggccgacggctggttcatcttcaaagggcacatcccggccatgatcgctttcgtgatctatctgatcgccggcaacgccgaggtgaaccggggtccgttcgaccttcccgaagccgaatcggagctgacggccggttaccataccgagtattcgggtatgcatttcggtctgttctacgtggccgaattcgtcaatctgttcatcatcgcgggtgtagcctccacgatcttcctcggcggctggatgccgttgcacatctccggctgggagggtttcaataccgtcatggactacattccgggcttcgtctggttcttcggcaagacgctcttcgtcatctggctgctgatgtggatcaaatggacctttccgcgcctgcgcgtggaccagattctgacgctggagtggaaatacctggtaccgatcggactggtcaatctgctgctgatggtcgtcatcgtcgtattcaaactgcatttctaagtatggcaaattatatccaaggactctttcacggcatccgtaccctgctcacggggctcaaggtaacgggcaaagaattcgtcaccccgaaaatcacggagcagtatcccgaaaaccgggcgacgctcaaaatgaacgaacgcttctgcggaacgctcacgatgccccacgacgccgagggcaaaaacaagtgcgtcgcctgcggactctgccaggcagcctgtccgaacggtacgataaagatcaccaccgaaaccgtcacggacgaagagacgggcaaaccccggcgtcgtctggtcaaatacgaatacgacctgggagcctgtatgttctgccacctgtgcgtgaacgcctgtccgcacgacgcgatccgtttcgacacggctttcgaacacgcggtctatacccgcgacaaattagtaaaaaccctgaacaaataacgtcatggagataacactcgacctgatcgtctttaccgtgctggccgtcttcacgctggcgagcgccgtactggccgtaaccaccaaacgcatcctgcgtgcggcgacgttcctgctgttcgtcctcttcggcacggcaggcatctatttccagctcaactattcgttcctgggtgccgtccagctgcttatctatgcgggcggtatcacggttctatacgtcttttcgatcctgctgacctcttccgagggagacaaggccgaaaaactgcgcggctacaaattcgtcgtgggcatcctggcgaccctcgcaggactggcgatctgcctgttcgtcaccctgcgccaccagttcctgccggaacacttcgagcacggtgaactggccgtccgggagatcggattcgcgttgatgagtcccgaaaaacagggctacctgctgccgttcgaagtcatcagtttattgctgctggcctgcatcgtcggcggtatcctgatcgcccgcaaacgataataaaaaggaaccagaaagagtaaaaaagagagacaggccgcattcgtccattttaccgtataacggctcctccggcggaggagccgggcagggggggggcgaggaaacagcgaaacgtcgtgcatgaaggcagcggcaaagcgatgcggtcgatggaaagtgtacaaaacaaattactgctatgatacacatggagtattacctgatcgtttcgacgatcatgatgttcgtgggaatctacgggttcgtcacgcgccgcaacctgctggcgatgctgatctcggtggagctgatcctcaattcggtagatatcaatttcgtggtattcaaccgttttctgttcccgggtcagttggagggcttcttcttcgccctgttcgccatcggcatcagcgctgcggaaacggccgtggctatcgccatcatcatcaacatctaccgcaacctgcgccacatccaggtcaaagatttgaagaaactcaaatggtaacggattaaaacgcatcgactatggattttaccattctaattctcgtattgccgctgttgagtttcctggtactcggactggccggcaccaaactcaaaccgggagcggcgggcgccatcggtacggtcgtgctgggtgcggtcaccgtgttgagctacctcacggccattctctatttcggtgccgggcgtaacgcggagggcattttcccgacgctgatgccctacaacgccgtttggctcccgatcagccagacgctgcatatcgatatgggcatcctgctcgatccgatctcggtgatgatgctcgtcgtcatctcgaccgtgtcgctcatggtccatatctattcgttcggctacatgaaaggggagcggggcttccagcgttattacgccttcctgtcgctcttcacgatgagtatgctgggactggtggtcgccaccaacatcttccagatgtacctgttctgggagctggtgggcgtaagctcctacctgctgatcggcttctactacaccaagcccgaagcgatcgcggcatcgaagaaagccttcatcgtcacccgcttcgccgatctgggcttcctcatcggcatcctcttctacggctattatgccgggacattctccttcacgcccgacgcacaactgctggccgccgccgggacgatgatcccgctggccctcggacttatgttcatcggcggagcgggcaagagcgccatgttcccgctccatatctggctgccggacgccatggagggtccgacccccgtatcggccctgattcatgcggcgacgatggtcgtcgcgggcgtctatctggtcgcccgcatgttcccgctctacatcggctatgccccggaggtgcttcactgggtcgcctacatcggcgctttcaccgcgctctatgcggcggtcgtcgcctgcgtgcagagcgacatcaagcgcgtgctcgcgttcagtacgatctcgcagatcggttttatgctcgtggcgctgggtgtctgcaccacatccgatccccacacgggcggactgggttacatggcttcgatgttccacctcttcacccacgccatgttcaaggcgctgctgttcctctgcgccggttgcatcatccacgcggtacactccaacgagatgtcggcgatgggcggcatgcgcaaatacatgcccgtcacgcacatcaccttcctcgtcgcctgtctgtccatcgccggtatctggccgttgagcggtttcttctccaaagacgaaatcctgaccgcctgcttcgccttcagtcctctgatgggctgggtgatgacgggtatcgcaggactgacggccttctatatgttccggctctactacggtatcttctggggcaaggagaacaaggaactgcatgcacatcacacgccgcacgaagctccggccacgatgaccgttcctctcgtcgtcctggccgtgatcacctgcgtcgcgggattcattcccttcggcgatttcatatcgagcgacggagaagcctatacgatccacctcgacggcggggtagtggccatcagcctcaccgtcgccatcgctgcgatcgccctggcgacctggatgtacctgcgggccaaacagcccgtcgccgaccggctcgccacgaccttcagcggcctgcacaaggcggcctaccaccgcttctacatcgacgaggcgtatcagttcgtcacgcaccgaatcatcttcggctgcatttcgcgtccgatcgcctggttcgaccgtcacgtggtggacggcttcatgaacctactggcccggacaacccagagcgccgcactggggatccgcttcatgcagagcggcagcgtacagcgctactgcatctggttctttgccgggacgctcggcctgacccttttgttactcatcctccgataatccgaacgctatgaatatactttctctgtttccgctgatccccctggtgatgatgctggggctgtggatttcgaaaaatacgcggcagatccatgccgtcatggtcgccggctcctcggcactgctcgcgctggcgatttatcttgtgttccattacctcggcctgcgggaagcaggcgctacggacgcgatgctccttacggacagcgtcgtctggtacgctccgctcaacatccattacgcagtgggcgtggacggtatctcggtagccatgctgctactgtcggccatcatcgtcttcacgggcacgttcgcctcgtggcagatgaagagcgacgtcaaagcctacttcctctggttctgcctgctctcggtcggtgtcttcggattcttcatcaccgtcgatctcttctcgatgttcatgttctacgaagtggcactgatcccgatgtacctgctcatcggcgtctggggcagcggccgcaaggagtattcggccatgaagctgacgctgatgctcatgggcgggtcggccctgctgctctgcggcatcctgggcatctacttcggcgccggggcgcagacgatgaacctgcacgagatcgccgcgctgcacaacattcccctctcgcaacagtacatctggttcccgatggtcttcgtcggcttcggcgtgctgggcgccctcttcccgttccacacctggagccccgacggtcacgcatcggcaccgaccgccgtgtcgatgctccacgccggcgtgctgatgaagctgggcggctacggctgtttccgcgtggcgatgtacctgatgcccgaagcggcgcacgaattgagctggattttcatcatcctcacgacgatttcggtcgtgtacggcgctttctcagcctgcgtgcagaccgatctcaaatatatcaacgcctactcctcggtatcgcactgcggactggtcctgttcgctatcctgatgatgaataccacggccggcacgggtgccattctgcagatgctgagtcacggcctgatgacggccctcttcttcgccctgatcggtatgatctacggccgcacgcacacgcgcgacatccgcgagttgagcggcctgatgaaggtgatgcccttcctggcggtagggtacgtaatcgcaggtctggcgaacctcggactgccgggtctgagcggtttcgtcgccgaaatgacgatcttcaacggcgctttcatgaataacgacacgttccaccgcgtcgtgacgatcatcgcctgcacgtcgatcgtgattacagcggtctatatcctgcgcgtcatcggccgcatcctctacggcacctgccgcaacgaggcgcacctgaaactcaccgacgccacgtgggacgaacgactcacggtcatctgcctgatcgccgctatcgccggcatgggtacgatgccactctggatcagcgatatggtaagcggcagcgtttccacgatcatctcacagctaatgaactaatccgactatgaattacagcgaaatattccacttcatgcgacccgaattgacgctcatcgtcacgatcgcattgcttttcctgttcgacctgttcgccccggagcggctccgcagatatttccaccctctggcctgcgtcctcctgacggtacagatcctcgtcaatatcgttccgacaccggactcagggcagctgttcggcggtatgtaccagtacgaaccgatgcagagcatcgtcaaaagcatgctggctatcggcacgtttgtcgtcttcctgcaatcgaacgaatggctgcggcgcgaggacaccgcccataaacggggagaattctatctgctgaccctctccacgctgctgggcatgtacttcatgatcagtgcgggcaacttcctgatgttcttcctcggaatggagctggcatcgatcccgatggcctgtctgatcgctttcgacaaataccgccacaactcggccgaagcgggcgccaaatacatcctctgcgccctgttttcgagcggtctgatgctctacggcatctcgttcatctacggcacggccggtacgctctatttcgacgacattcgtctggacggctcaccgcttcaaattatggcgctggtgttcttcttctccggtttaggcttcaagctctcgctcgtaccgttccacctctggacggccgacgcttaccagggagcgcccacgaccgtcacttcctatctttcggtcatatcgaaaggctcggccgctttcgtgctgatgaccattctaatcaaggttttcgcaccgatggtgcaggagtggcgaacgattttgttcgtagtcatcatcctgagtatcacggtggcaaacctcttcgccatccgccagcagaatctcaaacgcttcctggctttctcatccatctcgcaggcgggctacatcatgctgggcgtgatcggcggctcggccctgggcatgacctcgctggtttactacatcctggtctatatggcagccaacctggcgattttcggcatcgtttcggccgtcgaacaacatacggacgggaaagtttgcatcgaggactacaacggtttctaccgcaccaaccccaaactggccgtgctgatgaccctctcgctcttctcgctggccggcatcccgcccttcgcaggctttttctcgaagttcttcatcttcgcggccgctttcaaggagggatttcatctgctggttttcatcgccctgctcaacacagtgatctcgctctactactacctgctggtggtcaaagccatgttcatcacccccggcgaacaccccatcccgaccttccgcagcgatcggggaacccgtttgagcctggcgctctgcactgccggtgtactgttgttgggtatcgccagcgtagtgtacgattcgatcggagcgttcgccttcggcatgtaagcgacgcatccgcagcatattatccggcggacggctctttcgggctgtccgcttttttggaaccgggagcagggttgcagaaacgccgaaatctgcgtatctttggtcacatctaataaaacgacgactatgaaccgaatcaacactctcttcggaatcgaatacccgatcgttcagggcggcatggtgtggtgcagcggctggcggctggcctcggccgtaagcaacgccggcggactgggcctgctgggagcaggctccatgcatcccgaaacactgcgggaacatatccgcaaatgccggcaggcgaccgacaaaccgttcggcatcaacgtaccgctgatgtacccccaactcgatgaagtcatgcaactgatagtggacgaaggggtcaagatcgtctttacttcggccggaaatccgaagctctggacaggctttctcaaatcgcacggcatcacggtcgtccatgtggtttcctcctcgaaattcgcccgcaaatgcgaagaggcgggagtcgatgccatcgtagccgaaggtttcgaagccggcggtcataacggacgcgaagaaacgaccaccttatgcctgattccggccgtacgacgtgccacctcgctgccgctgatcgctgcaggaggcatcgctacgggcgctgggatgctggcagtcatggccctcggggccgaaggcgtgcagatcggaacccgcttcgcattcgccgcagaaagctcggcacacgaaaacttcaaaaaccgctgtctgagtctggaagagggcgatacgatgctgatgctcaaaaaagtttctcccacgcgcttggtcaagggcgatttcttccgcgaggtcgaagaggccgagaaccggggagctacggccgaagagctgaaaacgcttctcggaaaaggacgcgccaaaaaaggcatgttcgaaggcgacctcgacaacggagagcttgaaatagggcaggtggcctcgcttttccgcgagcagcaaactgcggcagaaatcgtgcgcgacatcgtgaccgaataccgcaacatactgagtaaaagccgagaaaaactatccatctaaaccgacgcacgaagaatgatcaactacctccaagtcgaaaatctgaccaagtcgtacggcgatctggtgcttttcgacaatatctctttcacgatcggcgaaggacagcgcattgccctgatcggccgcaacggttccgggaaaacgaccctgctgaatattctcgcaggcaaagatacggccgacagcggaacgatcacgccccgccgtgacctgcgtatcgcttatctggaacaaaacccggaatatgctgcggatctaaccgtactggaagcctgtttccgttccgacaatccggccttgcgagccatcgcagcctacgaacaagccgtcgccgatcctgcgcaggacgggttgcaggaggccatgagccgtatggatgccctcgctgcctgggactacgaacagcgggccaaggagattctgtcccgactaaagatcaacgatttcgacaaaaagataggccagctttccggcggacagctcaaacgtgtggcactggcagcggtgctgatcagcgaagccgacctgctgatcctcgacgagccgaccaaccacctggataccgacatgaccgaatggctcgaagagtacctcacgcgaaacaaggcagccttgctgatggtcacccacgaccgctatttcctcgaccgggtgtgcagcgacatcctggaggtggaccagcggtcgatctctttatacaaaggcaattatgcctactacgtcgagaagaagcaggagcgggccgaagccgccgaagcccggcgcgaaagcgacctgaatctctaccgccgcgagctggagtggatgcgccgccagcctcaggcgcgggcgaccaaagcccgggcccgcatcgactcgtttcacgaactggaaaccagactccgaagtacccgcacgcaggcgtcgctgaaactcgacgttcaggctacgcgcatcggtaccaagatattcgaagccaaagagctctgcaagcgtttcggggatctggtgatcctcgaccgtttcaactacaacttcgcccggtatgataaactgggcatcgtcggggacaacggctgcggcaaatcgaccttcctgaagctgctcaccggcatcatacagcccgacagcggcacgatcgaagtgggcgagagcgtccgcttcggctattacagccaacaagggctggacttcgacgagggaaagagggtgatcgacatcgtaaccgacatcgcccacgaaatccacttgggcgacggacgccggatgagcgcatcgcaattcctgcaatatttcctcttcccgcccgaggtgcagtacagttatgtcgcaaggctcagcggcggcgaacgcaagcggttatacctctgcacgatcctgatgcagagtcccaatttcctgatcctcgacgagcctacgaacgatctggacatcgtgacgctcggcgtactggaagagtacctgcaagcgttcaaggggtgcgtgatcgtggtttcgcatgaccgctacttcgtcgataaagtcgccgaccatctgctcgtcttctgcggagacggcgagatccgcgaattcgccggcacctactccgactacaccgcttggaaacgcgactacgaagcggcgaaacaggctgccgtcgcccaggagaaagccaagagcacggcatccggaagcaggggcggggagatccggaagtccgggacggccccggcaaaaacaggagcggcacgcaagctcaccttccaggaaaaacgggagatggagcatctcgaagccgaaataccggaattagaacagaagaaagctgcaatcgaagaaaaactctcgtccggcgacctgccgttcgaagagcttacggcgctttcggagcagatcacggcactcatggaccagatcgacaccaaaagcatgcgatggctggaattgaacgagatcggaggttgattccttcctgcatacactctgaaacatcagaataggttctaaagccgatacactcctcttttcggggagtgtatcgatatttttttctcgcaacaattttatttttcgaaaaatttttcttaattttatttccggaagtttacgataaacaaccaattccaactaaattaactctccatttttctcaagccgccttcccgggcggcttggttttttaacctttccgcaagcatcctccatccgcaagaaccgatttctatattgagcttaaaaattattcggcgaacacctccgatacatcgatggctgcaacccgatttcacgaccatttgcagcgataaaccgtcgcccccttggattcttcggaacggggaacaaaaatccgtctgaaccacactgcgtaacaactcgcaaccgcaatagtaaacgatacacattccgcaaccgcttttcgaaaagcgaaatacccgacacttttcagcaatcggaaataacatccacaaagcaaaaccagcctccgatccggaagctggtttttacctccaaataatataactccccatttccgggaaagcggaacaatatatcgatcaatcgtcgtactctttcaacgcgaaacgcttgtcatcgaaggtcaattcgatcgtattgttcaacttcacttcccattcccggcaagtatgctcgattccgacgaggaaggttcccggaaagttccgagcgacgtaatccgcaatctgcgccggaacaacaaccgacggaaccgcccgcgaacggcttttaatttctcgccacattccatttcggcgaaatttcacttgggtaccatcggcgaaaacgactttatacgtaactgcaagttcgtcgagcgtcttgattaccaaaacaggattctcttccggataatgctgtgcgataaaagagcgggcctcaccgggcagttcctgtggcgctacggctctttcacactctatattccatgcgattgcaaagagtagagcgaatatagcaacgacacccgtgatccatacccacctttttcccgagccggatttcaaaacttcgggaattttagtcatcatagtctgtgacgttgaaattcaaatcgaattcgacttccaatccgttcgacagttcgatttcccacgaataggcatcacggtcgatcttgcggataaactgaccggggtagttcatcttcgctacgaaatccgcgatctgctggggaacgatcgccgcaggaacggccgaatatttacgatcgaccgccgaccgtcggcacggaattccacttccgtgcggtcggtataagtcacctcatattccgaaccgaagtatttgctctcctcaaccgcataagctacggtcagatccttgaaatacgtagcgagaaattcctgcgcggctttaggaaggttgtcgatcgtaatcggtttctcgcgtccgtcggcctaggccgacacgatgcctgtaagcaacaatgccactgctaaaatcatctttttcataatacattgattttaattaagtgaatattaggtttagaaaaattcaaaagttgtctagccgatccatcaatcttcgtaggcctcgatatttccgttcgtatccacacgcaaatcatactctcgacggtcttttcgtgcttcgaactcataccacataccgctggaagtttcgatgcattcaaattcgtcgtcgtcgagggtatagccagcctgctgcaccgcatccaaaatattttgcggcaaccggtggagctcccactcggtgcggagccagttgttgcgaccgtcgaaaagcacctctttcctgagattttcgtgaagaatcgtcagttcaagacatccgtcatcatattcgcgttccacgaccttagctcccggataacgatcgttcaggaagcgctcgatctcatcctctaccggcagtccattacctcccgtgtttcccatatctattacaggacgggaaatgatccgaacaggggagtcgtttacgtaaatatcgacctctttatgccgtgtctccacttcgacacaccagaaaacgctgattccgtctgccgtagccttatcgagtgaccatttttcgatgtcgtcgatatcgttggggctcgacagctgctggtcggccgctaccgcattgtaaatcgcttccggcacggccgaaccaatatcccgacgtccgtattcgatctttgcatagatgcggttcccctgcgcatcgaaatagagttcatgcttgtaaccgccgcaaacaagctcgacttccgtacctccgtattcccggtccacgtctatcaccgagcctccgccgttatcatcgaggtaaccttgaatctgctgttcgatacccgccgcaggtttctctggaatatagtcttcataaccatcatccgcagcattggttacttcgttcaccaatacgccttcggtcgaaaaatacaggtccatcccggtcgttatgccgtctgccgtgcgggtgacgccgataacatagacaacggtcacaccctcgctgtcaccggccccgacgacctccttgcgctcgagcttatccaccttaccagtacgggtccatccttcggcttcggtatatttgctggcatcgaaaccttcccggacagcctgcggaagtgccgcgaagtcgatattcgtttcggtcatggcccattgtccgtttgcattttcgaaccatgccgcattgttggccctggattccgtccgggtagcctcgaagaaaaagttcgccacagcatagtcgcctcgaagggaccatcgtacatcttgggcacccggataacgagcgttaaaagccgccaatacctcctgcgaaatatgtgagtcgcccggtcctccgacttcatccttgtcgcacgcagcgaacaggagagccgtcgcagccattgttaaaacagataatgtttttttcttcgtattcattgtttcgtttacttaaatgtttatcaataatttgtactgcgaaatcacagcctgaaaaatctttatcggaaacggacggggtatcaatcgtcgatacctatcaaattatgacttcgatcaaaagtcagctccattccgttattcaacttgacctcgacctcctgcttgtcgcgttcgattttgatgaccgcagcacccggatacagctcctgtactttggtttcgatcggcatcgaaacgattcctgcgggtaacgacgaataacggcaatccacctctttccacgctccgtttcgacggaactcgaccttgctgccgttcgtaaacatcacttcgtaaatgacttcgaaaaaatcgctctctttttttgcgtaggcgattttttcaccgggaaaataccgggcaatgaactcttgcgcctgtcgcggcatctgttcggttgtgaccgcacggtcgtgatcggcataagccggcgagattgtcagcagcgtgatgccgatcaaaaacgccatcatttttctcgtgttcttcattttctcaatattttttatcgggagatcacccgatcggtttgtatggtacaaaattgagaaccgattttggagcgaatttggaatttcgatattttgacaaaatattttttccaaacccgattatatatttcgataccccgatccgaaaccggccgatatgcttcgacgttcctccgagaaagggatttcggacagagtcagaaccggtaacagaggattatcgccgaaatcagcaaaaaacagtcgtcatattcgaatgcagctgatcctcgtcccaattatcgccagcttacgccaaaatggtggcggccattttcgaagcaataaattaatccgaggcgataataatccgttatggctttgaccagtgccaaaccgagccctgtcgagccttctttttgcgacccctgataaaagcgttcgaaaatatgtttctcatcaagcggcgatactccgtcgttaataaccgtcaatacatttccctcgatacgaatatctacggcggctccgtcggcactgtgaaggtaggcgttcttgatcaggttggaaaccaatatcgaacaaagcgattcatccatccggaccgagaaggtcccgggcaaatgcagacgacaacggattttgtgttctccgtatatatcgtcataaagcgccttccgctcctcgaccaggggaacgagatcgatgtcggtgctctgcggaaactgaccgttatctatcttggtaagcagcaacagcgttttattcagccggacgatatggtcgagcgtacgccgcatctgaataatttcgcccgtcgtttcctcgtccaggtccgcacaatcgagcagatactccatacgtccgccaagtacagccaacggagtttgcaactcgtgcgaggcattgcctataaactgtttttgacgctcgaacaactcctcggagcgatccacggcctgctgtgccgcaacattcaatcgacgaaattcggtaatagaggtattgttcggcacaggcgcgacttcgcgcccgggagcatagctatccaaccaatgcaacaactcataaagcggaagcatgcttttatggaacacccacaaggtcgttccggaaactgtcaccaaaaggaaaagatagagccacacgacccaccacatgactgtttccagcagatcgtctttttcgaaagtaggcatagccaccttcagttcataaaaattaccgtccttatcctgaaaaatagtcgccaacacccgggccggctcggtttcatccttttccggaatatacacctcggtatcgtagtagtcgatcgaaggacgggtggcgacgtatccggattcaacggggatgatcgtgtaactgttgttggaaccttcgttcgaacggggcaaaggctccccggcaagcaccctcattacgatcaattccgaataatccttgagagcatcgtccgcttcatcgtttatctcgtccatcatggtaaaataaaatacgaccgcccataaagcgatcagcgggaacaagaccagcgacagacgaagcgatatgttatagatcaatttcataaatgcgttgcttaatcaatcagtttgtaaccgaaaccgtacacagctttgatttcgatcgaggctccggcctcttcgagtttgcggcgcagatttttgacctgcgaataaacgaaatggaaattgtcggattgatcgacatgatcgccccatacggcttcggccaaaaccgccttatcgaccacatgacgcggacgctgcatgaaatacgaaagaatatcgaactcctttttcaataaagcgacctccttgccgtctatttccactcggcaactttccgggtcgagcgttacattacccagcgcaatgccgcctttcccgccaccgcgactacggcgaatgacactctggatacgcgccgagagttccgccagatggaacggtttaggcaggtagtcgtccgcaccttctttcagcccgaggaccttgtcttccaaagaatcccgagccgagataatgattacgttttcgcgtttatccgctattcgaagacgctcgagaagttgcaacccgttgccgtccggcagcataatgtccaataagatacaatcatacgaataggctgccaatttgtccgaagcctcggcgtatgtactggccgtttccacgacatattgctctttgcgaagtgcacgtgccagcaactcacgcaatgaggattcgtcttccacgatcaataatttcataacgacaagtcattttaataccacaaacaaaaataccgattttgtaaagaaattgaaatgaactcgaattataatctattcaatctataaaatcgctaataaaaagcctgttaaagtcgatttttcatagtcgcaacggcggcactaatacagaaaaatacaagtagcgagaaacaggtcgttcgttcgactctatttcttcaaacaaagcacggaagggtgctgcaaaatcctaaaaccaacagtggaatccgttctttcctccgaaattctgaacaaaaaaacaactgaatatcgcaggaatcacctcaatagaatcaaaccaggtccggtacgaatcccaatcaaactcctataaaaaaaccggctaccttacaaaaaggtaccggtaatcgagtactctactataaatcccgtcgaataaagattatcgcctcaataaacgaaattaaaaatcatcttcccatatttcatgctcgatctccgcagagagttttcccagagaatctatcgtaagtaatacggggtaaccaatatccgtatccggttggtaaataccaaaagacaacacgacccggcggtcatcataatctcgaatatggacattatataattgataacgatcaatttctgtcgccggaataagcgaatcgaaatcgtatttatcgatttccaatcgagagactaattttccattatttctcgaaacagttaagacagacgacctatctgcatacttatagtgcgtagtagatacgatattctgattatcttcagtacgacaatatatataaaaatcaccagcaacggtgtcgattacatactcctgctcatgaattacgtttgtatcgatcgcggaacagtagttcgaaagaggatctttacccaatagtttacaactatccgataacgactgtattttattggtcgtatcattctgcctattatgtttatttgcacatccgacgtatgaaagtaaacacagatttaacaatataagatatttcataaaatcacagttttacgatttgtattctctgtaattcacatcagtcataagatattctgctttcctgacggaataccgacggcgaaatacccgtatgtttcttgaaataacgccccaaataagactgatccgggaaatgcattttataagcgatctcctgaatgggcagggtagtgttctgaagcaatacttttatttccattattacgatcttatcgatcaactccttggccgattgatgcgtcgtccggcgcacgatggcggaaagataacgggtcgagatacagagcttgtccgcatagaaagaaacctcacgctcttcgatacaacagtcatgaactagggaaacaaagcgatgaaacagctccatctgccggttggaagtcgtgggacactggctgctgaccttacgctggatcttatcgtaaagctccagcataatattctgcaaccgatttctcacgatcgtctttcggaacatattaccccgatcctgataggtgtaatccattatttcgaaccaggtagacaatccggcagccattctttcgtttacttgagaaatgggattttccttcaaaaagctgaaaaacgagggccccagccgaaatccggcctccccgaacaggtcgggagagaaggcgccgaacctcaccgagaagtcgtccgacgcatcgtcgagcatcaatacgctaccgggcagtaagagtacgatcgtattgagctgcaaaggtccccggcgaagatcgacggtcacctgggcatgaccgctcgtacaaagcagaaccagtgcgcagtcgcaacggcagggattattgaagaaataagcgagatcggattttccgataacaaaaggttcctcttcggaaacagttatggggtttacagcagtcataatgatttcttcttttttgaacaaacggaaagcccctgagattattatcgtacaaatatattataaatgtaccgaaaagtgacaaaattgttcgcaagaaaaagacctgcaccccgatttttacggtacttttgcaggacaaaaagttttttaacgggaaaatatttttttcaaagtaataataatcaaccaaaaaactatgaagcagaagttaattcaggcagtcttgttcggaagctgcatggctttcgccgtatcgtgcggccaggctccgacggcaagaggcgaggcggaatattccgtcatgacaatttcgacatcggacgtaacgattccgagcacccactcggcaaccatccgtgggcgccaggacatcgccatttacccgcaggtatcgggtaccatttccaaagtgtgcgttaaagagggtgaagtagttcgccagggacagttgttgttcattatcgaccaggtgccctacaaggcagccctgcaaaccgcaaaagccaacgtcgcagctgccgaggccagcgtagccaccgctcaattgacctacgacagcaaaaaagagctgttcgccaagaacgtcgtttcgcagttcgacctgcaaacttcccagaacaacctgctgacggcaaaatcccagttggcacaggccgaggcacagctcgtcaatgcggccaacaacctctcctataccgaagtgaaaagtccgtccaacggcgtagtcggtgtcctgccgtatcgtgtgggtgccctggtgagcgcatcgattccccagccgctgaccaccgtatcggacaactccgatatgtacgtttatttctccctgacggagaatcaactgctcgacctgacccgcgaatacggctcgatggacaaagcgctggcggcgttgccgaacgtgcagcttgtgctcaacgacggatcgctttactcccaggagggacgcatcgaatcgatcagcggcgtgatcgacacttcgacgggcagcgtacagcttcgcgccgtattccccaatcccggacgcctgcttcacagcggtagctcgggtaatgtcctgttgccgcacatctacaaaaacgtagtcaccgttccgcaagtcgctaccttcgaattgcaggacaagaaattcgtttataaggtcgagaacggcgtagccacctcgcagaatatcaccgtatcgccccagagcgacggcaagaatttcatcgtcaccgccggactcaccccgggcgaagtcatcgtgaccgaaggcgtcggtctgatgcgcgaaggaaccccgatcaaacccaaaggagccgcaacgaccgcgaccgctcctgcagaacaacctacaaaagagcagtaaaatatgacactaaaacatttcatagaccgcccggtattggcggcggtcatttccatcgtaatcgtcctgggcggtattatcggtgttgcgacgctccccgtcgagcagtaccccgacatcgcgcccccgacggtgatggtgcgtgccagctatccgggcgccagcgccgaaaccatccagaagagcgttatcattccgcttgaggaggctatcaacggcgtggaaaatatgatgtacatcaaatccgaagcatcgaatgccggtagcggatcgatcacggtctatttcaaacagggcaccaacgcggatatggcggccgtcaacgtacagaataaagtagcgacggcaaccggatcgctccctgccgaggttacaaaaatcggtgttacgaccatgaagcgtcagtcttcgatgctggaagtcttcaccctttgcagccccgacagctcctacgacgagtcgttcctctccaactatatgaacatcaacatcaagccccagatacttcgtattcagggcgtgggtgagttcgtcgtgctgggatcggactactcgatgcgtatctggatgaagccggacgtaatggcccaatataaattagtcccttcggatgtcactgcggttttggcggaacaaaacatcgaatcggcagccggtacgttcggcgagaactccgaaaatacgttccaatataccatgaaataccgtggccgtaaaatgacgcccgaagagttcggggagatcgtgatccgagccacttccgacggtcaggtactgcgtctgaaagacgtggccgacatcgaactgggacaggagtcctacgcttatcacggccttgtcaacggctatcccggcgtttcggcgctcgtcttccagaccgcaggtacgaacgccacgcagaccgtagaggagatcgacgccttgctcgccgaggtcagcaaggatctgcccaaaggcatcgagatccgtccgctgatgagtgtgaatgactacctgtacgcttcgatccacgaagtgataaaaaccctgatcgaggccatcatcctcgtcgttctggtggtttacgtcttcctgcaggatatacgctcgacgctgattccgaccatttcgatcctcgtgtcgctggtcggtacgttcgctttcctttcgttcgcgggcttctcgatcaacctgctgaccctcttcgcactggtgctcgccatcggtacggtggtggacgacgcgatcatcgtcgtcgaagccgtccaagcacgcttcgacagcggctacaagtcgtcatacctggctacggtcgatgccatgggcggcatcacttcggccatcatcacctcgacgctggtctttatggccgtgtttatcccggtgtcgatgatgggcggaacctcgggtacgttctatacgcaattcggtatcacgatggccgttgccgtcggtatctccgcactcaacgcactgactctttccccggcgctctgcgccctgctgctcaagccatacgtcgatgaagacggcaacgtgaagaacaacttcgcggcccggttccgcaaggcttacaatacggctttcggtgccgtgctcaagaaataccagcgcggcgtcatgctcttcatcaagcacaaatggctcacctgggtaacgcttggtctggcaatggtcggcctggttctgctgatgaacagcaccaaaacgggtctagtacccgacgaggaccagggtacgatcatgatcaacgtaacgacggctccgggtagctcgctcgccgaaaccaacaagataatgggcgaagtaggcgagcgtctgaaaagcattccccagatccgcgacttccagcaggtagccggttacggtatgatcgccggacagggtaactcctacggtatgtgtatcgtcaagctgaaagactggtcggagcgtcccgacaaggccgacgccgtgaatgccgtaatcggccagatctatgcccggaccgccgacatcaaggacgcgcagatcttcgccgtcgctcccccgatgatcaccggttacggtacttcgaccggtttcgaaatgtatctgcaagaccagacgggcggcgacataacggacttctacaacatctatttgcaatacatctatgcgctcaaccaacggccggaaatccagatggcctattcgaccttcaacatcaacttcccgcagtatatggtggacatcgatgcggcgaaggccaagcgcgcgggtatctctccgacagagattctttcgaccctttcgggctactacggcggacagtacgtgtcgaacatcaaccgcttctcgaaagtatatcgcgtgatgatccaggccgatccgaaataccgactcgatcccgaatcgctcaacaacgtgtacgtgcggatgcagaacggcgaaatggcaccgatcagtcagttcgtcaagctcaccaaggtatacggatcggaggtattgagccgcttcaacatgtataacagtatcgccatcagcggtaccgtcgccgacggatactcgaccggcgatgcgatcaaggccatcgaggaggtagcggaacaggtgctgcccaagggttatggctacgacttcggcggccttacgcgcgaggagagtcagacaggtagcaacacggcgatcatcttcggtatttgcatcatcctgatctacctgattctgagtgctctttacgagagcttcctgattcctttcgccgtcattctggccgtaccgtgcggtctgctgggttcgttcattctggtcaagctcatcggacaggagaacaacatttacctccagacgggtcttatcatgattatcggtctgttgtcgaaaaccgcgattctgattacggagtacgccgcagaccgccgcaagtcgggcatgagcctctcgcaggccgccttctcggcagccaaagcccgtctgcgtcctatcctgatgaccgtgctgacctgcgtgttcggtatgatcccgctggtaatcgcaacgggtgtgggcgccaacggtaactcgaccctcggttcgggcgtcgtcggcggtatgatcgtcggtacgttggctctgttgttccttgtgccgtccctgttcatcgtcttccagcacctgcaggagaaggtcaaaccgatccaattcacgaacactcccgactggatgatcgaagccgagatcgaagacagcaaaaaagaaaacgaagagaagaagtaaaccatgaaaaagctaatcatcatacttgccgcagccgccatggctggctgcggcatttacaagccctacacgcgcccggaagagatcaaaaccgacgggctttacggccagggagtcgaaacggtcgatacgatgaccctgggtaacatttcctggcaggagatgttcaccgatccctacctgcaacagctcattcagcagggactggacaacaacaccgacctccagtcggcttactggcgcgtaaaagaggcggaagcgacgctgaagtcggcacgcctggcatacctgccctcgttcaacttcgctccgaacggaggcgtgagcagcctgaccaacccttggaacgccacgtggacctacaccgttcccgtaacggccagctgggaggtcgatattttcggcaaactcaccaacagcaagcgccgggcgaaagctcttctcgcacaaagccaggagtaccaacaggctgtccgcacgcaggtcatcgcctccgtcgccaatctctactacacgctgctgatgctcgacgctcagtacgagatctcttcggaaaccgctgaaaaatggctcgaaactgtcaatacgatgcgggccatgaaagaggcgggtatgaccaacgaagcggcggtttctcaagccgaagcaagctactattcgatcgaatcctcgctgttcgatctggagtaccagatccgcgagatggaaaacagcctctcgtcgctgctgggcgaagctccccgcagcttcgagcgcggtacgctcgacgagcaaattcttccggagaacctggtggtcggcattcccgcacagatgctctccaaccgtcccgacgtaaaaaatgccgaatactcgctggcacaggccttttacaacacggccggagcccggtcggcgttctatccggccctcagtctgagcggtacgctgggttggaccaacgatggaggtgttacgacgctcgaccccgccaaatggattttcaacgctgcggcatcgctcgtacagcccatcttcaacgcgggcagaaaccaggcacagcttcgaatcgccaaagcgcaacagcaggaggccctgctgtcgttccagcagaccctgctcaacgcgggagccgaagtgaacaacgccctcgccaaatgccagtcggcacgctccaaagtcgatctgcgccagaaacaggtcgcttcgctggaaactgccgtcgagagcacccagcttctgatgcgccacggcagcacgacgtacctcgaagtgctgaccgcacagcaaaccctgctgtcggcacaactgtcgcaaatcaacgaccgcttctcggagattcaggctatcgtcgatctctaccatgccctgggcggcggccgtgaaatcgaatccgaaaccgataaataacaatgaaacgcagggtaacacgcgaagaaatcatccgcacgacgcgggacctcatcatccggaacggcatccgtgccgtccgggtggatgagatcgcacaaaagctggagatctccaagcggacactctacgaactgttcagcgataaggacaccctggtcgaacagtgctgggacaaaatccgggaagaacaggagaaaaagatcgcaggctacctcttttatcaacccggttcggccctcgaacaggcccggaatctgattcaagaatacattgccgctgtatgtatgatcagttgcatttcgcttcaggagttgcaacagaaggtttcctatgccgattcctacgaaaaaaaccgtcgtttctggctggactcgtttaccgaagtactggaacattgcgtcgccgacggcagcgtattgcccgatgtggactgccagctgttcgccaaacggttgatgaacgtactgctcggcctctacctcgaaggaggaacccgtcgggaaatggatgctttcgggtgggctctcctgcgcggaatcgccactcaccggggcatcgaatggctcgacggaaaaaagccgaactcctgacattttcacgtcgaagatccgacaatcggatttaccgaaaacaaaaagaagaaaggcagcgtttcaaacgctgcctttccctttttactttttattaacgcttgatcgaaagcccggtttaataggctttgttctggggatcgaactccgtccaacccgacatccatccgtcgttctcgtcggcgaaggctccgatataggtcacctcatcgaaaccgttggcaaccagcggatcggtaaaagaagcggccccgcgcagcgggctatcggagagcggaccgtagttcggattggcttgcagactgttgggctgggagagtttcagatcggcgatcgcatcgaaatacttgttcgaagctatcgacttgaaataggtcgaagagaaggactccttcgacttgtcgatgctgttcttgtcgccgttgtcgcagaaaccatcctcgaacgatttgttcacgtcgctgcccaggacggtcataccggccatatagacgttctgaatcttcaacgtaccctcggacgccgcagtctgcgtctgcgaacctttgtcgttctccacgatcagaccgacggggaaacccatcgccaccgaattgaaacagttcagatgcgaattgcggcgcacttgcatagcagactggaactggcccagcttggaaccgttcttgggattcatatcgcctgcggtgatataatcggaagtgttggagaatgctgcatcctgaccgaccggaccgacgaaggtcacgttcgaaaagacgcaggaggtgaaaggagaagtggcagaaccttcgccgttgttgtcgctctcgaagccgttcgacgccgaggtgtcggcaatgcggggatggcgcacacccaggcagaactgcaccttgccgcagaatccattgtcggtatcgaaatcgtcgtcccaggtgtgataggaaatcaggtatttggcatttaccgcaccgccgaaccactcgtaggagtcgtcgttggaataggacacctgcacgtggtcgatctgcgtagccgatcccaccgaaccgaacgtgatggcattgatctcctggtcctccttgaagggatagccggcgaactcgcagcgcacgtaactcaaggcacccgaacagtcggcattgtcgctgcctccgtgcgtagtgcggggaccgccctcgatctgcatcgtccccttgttgttcacaccgcgaccgcagagaatgataccgccccagtcgcccggccgacggctgccggcaggcatctcggaggtgaagacgatcggctcgctctgcgtgcctttagcccacaactggccgcccggctctacgatgagcgcagccttggtctccttgtcgcccttgataatcgtacccggagccagcgtcaggctcgcaccgtcggcgatatagcaccagcctttcaacaggtaggtacctttgggaagcgtgtagtcgcccttgatctcgaactcctgacgtccgtcgccgatctgggtcccgtcctcgaagagtatctccgtcagatcgccgccggacggatttccgccctcgccgctaccgccgttgcctccattgccaccgttaccgttctcgtcgtcgctgcatcctgcgagactcaacgcagccatcaaacagaccgcccataaaattttcttcataatttatttgattaaaaaaggttgattttccttcgactattttctcactcggtagaacccgaacgaatttctgcgattcacttaaaatttggccgtcacgctcagcgagaacatccgtcccgccgtgaactgtttggtgatttgcttgcgggacaccacatcgcctccgttctcgaatttcgggaattgggcgaactgcaccttctcgttcaacaggtccttggcgttgaacttcagctcccaatgcttgccgaaagatttgctgaccaccacgtcgagcgcgttgcgcggcatctcgtacatatccggaatatcgttgtcaatgctgccgcccacgctcatatcgctgcggccgatgcccacgatgcgcttgccgatgcgattatacaggacaccgaccgtaaggcccagtttgggcgactggtagaagagtccggcattgaccagatagggcgactggccctgcaacggacggtcgtgctcgaggctctcgtcgtcgaaatccacacggctcttcatgagcgaaccgttcagaaccaccgagaaattgcgcatccccataaaatcgaggtttttcttcacgtccagctccacaccgtacagattggcccggtcggcattctcgaacgtgtaagtataactgccgctgcccgcatcgagaatagccgtttcgatcggattgcggaaatgcttgtagaacacggccaccgagataccttcgcccgcagccggataccactcccagcgcagatcggcgttctggatataggccgctttcaaatcggcattacccttcacgtcgctgaacaggtcgaaatcgtaatagaccgaaggggaaacttcgcggaattcaggacggttggtggacataccgtaagcggcacgcagcaggtgcttgtcgttgatgcggtatgtcacattgaccgaagggaagggatcggcatgggtatagtttcgtgtttcgctgtcccagtccttgatcttggtgtacgaggtgagcgccatacggctgtattcgaaccggacgccggcataaacgttccagcggccgaagggcaggtcgatgccggcataagccgccgtcaggatgttgtcgcccttgtagctgttgcggttgtcgctgtcgtcgtagatatagagcttgtcggcgccgtaattaccgtcttgcaaaatatcgtcgatcacatcgccgtaagcaaagtccgcaggcaggttgtccgtgtcgaagcgatagaaataggcccgggtgcgatagtcccgcgtacggtattcgccgtagagtccgaccttcagttcgggggcgaacgacgaaccttcgcgcaaggtgcaggagtagttgatgcccgccgaagcgatgtgttcgcgcaatttcatgaagtcgcgccggatctcgttctgatcgatctgcatttgaccgtagtgcgcatcgcccaccatgtcgttctcctgccggttgacgatacggcggtcgggctggttcttgtcggcgtaggaatatccggcatcccagtccagagttccctgttcgagagtatgtacacccgctatctgcccgctgtacgtgctgcgagaggtgtagcaatactccgttttctcctggatatagagcgacgacatattctgccagccttcgcgcagcgtgagcttgtcctgtccgatctggttgaaaatgttacggaaatagtagcgattctttccgttcaggtaagccagattcagcaagacgcccactttgacgttggtctggtactggtcgtcggtatatttgtagtagtattcgggtttgtcctccaccttgttataaaccccgtaacgggagttttccatattcgagaaggtccgggtggcatagctgtaattgagcgctccgttcagcgctagatcggcgccgttgcccaggcggaagctgtggccgtaggagaatgagaaccgctggtcgggaatcggcttgcgggtcttgatcgaccagtcgttgttgaagccgtgacgggtcatgtcggtaacgaaatccggatcggcgttatcgaaagcacccgtaataccaccccgcacgccgcgcttgccgttgtcgcagccgaaccagtcgctgccgcttcccggattgtagagaaagtcgtggccgaaggtcgccgtgttgaacccgatcgagtaggagagggcgaagggtagttctcccggcgtatctttggtgttgatcttgacgaacccgcccgtgaaatccgcagggatttccggaacgggggacttcaggatcatgatgttctcgatctgccccgcagggatcagatcgaaggagaaggcccgcgaatcggcttccgagctcggaatggccgcatcattgacccacacattattataacgctgcgagagacctctcgccacgatgaatttgtcgtcgatgatcgagataccgggtatgcgtcgcacgacttcacccgcatcgcggtcctgcgtgcgggcaatcatctgcttcgacacaccgctcacgaccattttggagttgcggacggcctgcatcacggccgcctcgctcgaaagccgccgcacggtggtcacgaccacctcgtcgatctcttcggccgagggttgcagcgaaatcagcggcagggtattctcgcccggcttgatctgacacccctcgatcactacgcgctggtaggagagcatctgcacttcgatcgtataagtgcccggctttacattattaataacgaagcggccgtcggcatcggcgacggccccatacgtcgtattctgcaaaatcacggcggcgccgatgaccgcctcgccggtcgatgcgtcctgcaccgtaccggtcacaacagacagaaggggcgctgcaaccgtcgtgcagatccccttcagcatcaataacccaatcaataaaaatctattcatccacttattattttacagcggcaaaagtaccgggccgctgtttcacccgggctacaccctcgttacaaaagcgtcaaacaaccgtttcaaatccgttacacgcccgacgaaacagttgcacagtccatcgaaaaaggctacatttgcagccgattaaccctatttccgatatgagaaacctctcacgccacgcgggacccaaccgcatgatgttcctactccttatcccctgtcttctgttgtccgcacttcgggcaaaggcggaagaaaccgcacttcccgagggaaaaagaccgggcgtaacgcttcaggtcgagatggatctggtcagcagttatatctggcgcggtgtttacgaagcgggccccagtctgcaaccgggactgacgctcggcataggaaactttacgatagcggcctggggatcggtcgatttcacgtcgagttcatacaaagaggcggacctgatgctcagctaccggctcaaaaacatcaccttccacctcaaagacctttacgacgaaggttcggcctcggaccggaatccgcagatcagccgcaactacttccatttcggcgccgactccccgcaccgcatcgaagccggcatcgaatggcaggtatcgcgcaaagtccccatcacgctctcctggtacacgatccttttcggagcgcgggatgtcgatacccgggggcggcggtgctactcctcatacgtcgaggtagcctatccctttacggtcaaaaccatcgacctgaaaacgggcgtaggagccgcgccctggaaaacggcaggagaaggcggagccaaaggttttgccgtgaaaaacgtcttcataaacgccggaaaactgtgggcggtcaaaagcatgggttccttccgaatcggactcttcacccatctctcctggtgtccgctcaaagaggacatgaactgcgtaggaggcatttcgctgcggatgtaaccgcaaaaaacaacagagaagcccttccgtcatcgacggaagggcttctctgtttcgtacaattacacctccggacattccctttgcggacaagaccggcaaaagaacgagcttattgcatcacaagcacccaattcaccgcaaaaacagactttatcgttccataaattgaacgaaatatattattttttatacttttgtatgtacttcttacaaaaaacaattaacccgaaaacgctatgaaacaattcttcctgatcctatccggcctcgcattgctgacaggatgcagcagcaagaacgactctgtcgaaggccccgtacaatcccgcatccgaatcgctccgagcatctcccgtgttacagggctcaatttcgacaccggggaccgcatcggactcacgatcgtcaaatccggtgccaactactgtgaaaatacgcctctgcgtttcgacggtacggtcttcgtttcggacgacctgttctggtacgacgattcgagtgaaaaatcgaatctcacggcttactatccctacctggcggaaggagctccggcgagcttcaccgttcgtgccgaccagaagctcgccgccgatcacgaagcctcggacctgctggcagcgacggcgacggacgtcgtaccgagccaaacggccgtgaatatggtattcacccacctgctcaccaaaatcgtgatcgacattacgaacaactccgccaatacgatccaggaagtcaccctgaagggcagccgctgcacggctaccgtcgatctttcgacaaaaagcgtccaggtcgatgcttcttcggcggaaacggatatctatcccttttcaacggtgaccgcaggacggtatgaagccattctcgtaccgcaacgggcggcactcgaactcgaaatccaaacttccgacggtaaccggcacatcaaaacattccaggcgaccgacctgcaatccggcgcggaatatgcgatcgaggcggtaatcagcaatacgaacaaaatccacgcctccatcagcggcgccgtcaaaggctgggaggacggaggagcgatcgctccggtcgaagacgacctgccggaagattccgacctgctggagtacgcaggcgtcaagtaccgcatccggcaactcagcaacggtacgacctggatggcggaaaacctgcgctacattcccgaaggcaaacgcgtttcctcgtccccgtccgacgaaaacggcatctggtacccatgtacgacctcctttaccgcatccagcgacacggaatacatccaacggcagggtttgctctacgatctggctacggccgtaggggaacctgttactgcggataacttccgcaatatcgagggcgtgcaaggcatttgtccggaaggatggcaccttccgacccgggcggatctggaatcgcttatcgccgtgaacagtgaactcggcagctccttcttcacctatgccgggacacgcgatccgagcgggaaatacatcggatcgttgatgtccgggaatttctccaaaggttacctgctctgtacgagcaccgaaagttcggtctatactccggaggatctgaactaccaatacctgcttttctcgaaaagcaaccaggtaaacataatcgacatcgactgtcgctcgggcatgccggtacgttgcgtgaagaatgccacgtccggggaataaacggcacaaaaaagaattgcggaccggcacagagcataaaacgaccggacgtttccggcaaagcggcaacgcccggcaacatagggtccccaggaaagaccaccggcaacacggaaggaagccgcttttttgagcggcttccttctgctatttatcgctctggtaataagacctatccaacccgaaggcatagctatttctgtaccgccaggtgagcaagaccgcaacaaaggccaataccgcattcaaaataaacgggaatcgctcgccctgcatgtgcagaatatttcgcaacagatcgatgataaacggacagagaacgatggccaggtaattcaccgacatcacgatcgaaagagccagcgtcgccgattgcggtggagcagccacagccgccttgtcgtaaataatcggttgaataatgccgtatccgagtcccacgagagtacatcccgcaatcaaccagaaatgcgccttgaagagtccgataaagagcaatcccgcacagatcataatcaacgaaaccagattgacgctgccgcgcagacgccggatgatcggggaaaggaaaaagccgggcaacatgatagccaggaaaaacaaggacaccaaaagccccgagaaggaattttggttgccgtgcggatccaccaggaatgaaatgtagaaggtgatagccaatgccaggaaagtcgccagaaaataaaatcccatgaccgcagccagcttcggccagtcgatcttcttgtgcttcagctcatcgctcccgacaggttccggggcggcgggagttcggcggatgaagattgaaaggatcagcggaatcgccggcaacgtatataccaggaagggcaggtgccaatcgacattggccaggtagctcgccaacacagtggccagcaccaacgtaaggttattgatcgacgaactgtagcccaactgccggacacgataatcccccgtaaaatagtccacgatatatcccgtcgataaaggaatgataataccggcaccgatacccgtaagacaacttaccagaatcagaagccacatttggttaatgaaaagacaggcgaagccactcaggaaaaagaccgtaagcccgaccacaagcagcttgaacttattcccggttacagacaaacggcctgccagcagcataaaaggaataatcaacaccgaaggcaacgaagtaagcatctgtatctccagatcggtcgcatgcggaaagaccttgttcaagtcgccgagaataggggagatggcaagtccgggcagcgaaacgacggccgataccgaccagaccgccaacacggtcatccatggaatggttcctttaccggtttgtactctcatgtttgcagataaataaaaattcttccgaaaagaggaacaactgttataccaaaaaatcgccggagcgaaaactccggcgaaaataaggtatattgattcgaaaaaaagatattattcccttacgcaacgaacctgcaaaccattggctcgttgatagttccgtgccggaacaaattcactcgaagcagcatcgtccgtatcgagcgaaaaatagaggcccgaagcgctcaattcgtcggttcccaaaccgcttgtccaataacaaccgatccacggttgcgcgtccgcattgctgtttacattctggataagccccgtcagataagggcgacgcccgcctccgagaaaaaatgaagtcatcgttccgtcggtcaggttccagccgtaagcctcgcgcaacgcctccgtttgctcctggtcatgatcgtcgccgatcataaaatcggcataaacatccttgtccggaaccttccatcccttaggacagggatcgtaaacggtcttgaccgccccccacaactcgttgtcatggtcggaatagagccaatcgtaaccggactcctcgactcccagaataaaactcatcggataggctatggcatactccatcgtgcccgtttcgggggtggattccacatagtcaagataagtaagacgcccgttgatattatacatcttatgatcctccgcaaatgcacagttataatacgccggcccgatcatcggggtcggacgtccccactggtaataaagtccgtaggagagatatatgtcgtcctccgtggcattgccgccggctccggcacccagattacgggtcatgaaaacatctccggcagccgaagtaaccgactccgccgaaggatcgtactgcgtaacccacacatgccaactccaaaccaccttatcctgggcatcgaaagctgcgatcaatgcgtttccttcgataaactcacctttcttatccgccgcgacgaagaacgaaacccgaccgtcgtcgagtgtcaggttctcgatcatatgcgacgtgcttccccacataagttctacccgagccgtaggaatcttttcgccgtttccctttacggtaccgtcgaaagtatagtaggcattggcatagttggcgatataacagttagccgtctgccccgtcagatcgacggtccgcccgattccgaccctcaaatcggcggaaacggcctttccgtcggtatcgtaaccgaccaacgtcaggactcctcccgtttcggcattggagtcatcacttgcgggggccgtcacggtcatccggctcgtctgcaaatcggcggtcaccgtccagccttcaggcgtatcggtaatgttcagcttcacgatattcacagccgtaaattctaccgaagccgttcccccgggcttatcgaccatacaaacatcacgagggaaatagagggttcccaccggtccgtcgtcgtcgctgcaaccgacgagattcatcgaaacggccaggacgattcccaggcataaaaagcggcacacaagttttttcatgttcaaaatccaattttgctaaacgttacaaagatacgaataagccgagcgcaaaagcaaattttattcgcgttttgccggggcgaagtatctaagacgaagtcaaagatacgaataagcctaatgcaaaagcaattttatttgcgtttgaccaaagccaaagcatccaaaacgaagccaaagacagggaaagccgagagaaaacgggaacctgtcccggttttccgaagcgcatcctatctaaagaccatgatgtcaaagatacggaaaggcgagagtaatcgtgcagacttgtacgcaaaaatcgccgaaccgcaccccatcttcggcaaagatagtacaaaccacatacagaacaaacaggtcctgtcggaacatggccttattttcgcaaaattaacctcgacatttttactaaaacagctaatttccgattcttccgacaacagaaattccgttaggaacaattcttgcaaaggtaacgtaacaaatcgacttaaaaatacgcatccgatatggcaaaaaagacagcatcgccccacgaatcatcttccgaagggaaccaaatagccattaccgtcaccgaaaagggtccgtacctcgtcaccggaaacccgccgctggccatgcaattcatcatgcccgactccgagggcgagagttggtattttcaggaagggcggcatttttcgacagaaaaagaaccaacggcattgtgccgttgcggtttatcccgcagcaaaccctattgcgacggctcgcacctcaagggggaatgggattcggcgatcacctccggagaagaccggattacggacgaagtagagatcaccgagggacagcgggtgacattgaacgacaacgaaaaatactgtgttttcgcccgtttctgccatccttacgggggtgtctgggacctgacggccgcatccggcgattcgcagtcccgcaagctggccgtccgcgaagcttcgatgtgtccgagcgcccgcctgaccgcctgggacaaccgcacgggaaaaccctacgaattcatcttcgaacccagcctgggattgatcgaagacccggcgatcggcgccagcggaggactctgggtacgcggcgggatccacatccaacgcgaagacggccgaaccttcgaagttcggaacagggtagtgctctgccgctgcggacactcccgcaacaagccctattgcgacggtgcgcatgccgccgtcaaatggcaagacgcgctggagggaacccccgacggagaaacgctcccccgaagcgttgccagtgcaaaaatcgaaacccactgaccggcctgccgttccattcgaataaaatagagtccaccggcacgctgtacggcttggcccgtcatacttcggccccgaaacgggacgctccattctacaatacgctccgatagattcccgcccatatcgataaaagaaaccccgttgagatttcaacggggtttttcatgcgaacaacgattcgtcgtcctatttcttatcgggtttggcgatcgtttcgcgcatcgtagtatccgccatgatgttcttcatcttatagtaatccatcacgcccagatttccgctgcggaacgcttcggccatagccagcggcacttcggcttcggccagaatcaccttggcgcgggcatcctgcgccttggccttgttctcctgttcgagagctacggccatagcacgacgctcctcggccttggcctgggcgatgttcttgtccgcttcggcctggtccatctgcaactgtgcgccgatgttcttacctacgtctatatcggcgatgtcgatcgaaagaatttcgaacgccgttcccgcatccaatcccttctccagcaccacgcgggagatcgaatcgggattctccagcacgatcttgtgcgactgtgccgagccgatcgacgaaacgataccttcgccgacacgtgccagaaccgtttcctcaccggcaccgccgaccaactgcttgatattggcccgcaccgtaacgcgcgccttggcgatcaactgaataccgtccttggccaccgcagctaccggcggagtattgatgactttgggattgaccgacatctgtaccgcttcgaatacgtcgcggcccgccagatcgatcgccgtagccatcttgaaatcgagcataatattggctttctgggccgacaccagcgcatgcaccacattggtcacgttgcctccggccagatagtgggcttcgagctcgttgggattgagttccagaccggccttcgtactctcgatcatcgacgatacgatcgtcgagggcggcaccttgcgccagcgcatcaggatcaactgcaacaaactgatccgcacgcccgacaccaatgccgagaaccacaagcctacgggaatgaagtaaaaaataagccaaatcgcaaagagcgaaacgaagacgattaatgcaatgataccgatttccatcttttatctatttaatgtgtttgcgtacgattatattgaaattttcgaagccgacgacttctacctcccgacggggatctatataactgtccatggacttggcttcgtaaatcttaccgccgatctccactttgcccatcggggccaggcgcgaaacggtcattcccgtatctccgacacggacactctgctgcaccggttcgggcatcacagaggaatcgaccttctgtttcaaagagaaacggcgccaggttttggatcgcagcgaaacgacggtcgccgcgaacgaaaggatcagaacgacggcgacgacgattccgcccgccagaggaccgtaatcccggaaagcgatataaatggcaccgccgtagctgaccaacgcgagaatcgccccgatcgatacgcccggcagcaggacgagctccgccaccaaaaacagtaacccgaaaaagaccagcagaacgataaaaaacatattcacagcattaaaaattaccgaaaaagatcggagtaaccggttcgcaggccgaatttccacccgatgcaccgatatacgtccgaatacggacctacattctttcgggtgaagatacgcaaaaaatccgattattcagcaatttccgtcacttttaccgataattgaggatcggcggcgcgaatcgcggcagccgcctgatccgcgacagccttgttgtcgaactgtccgacgacgaaaagatccgcacccacgcgggacaggtcgcagccgggagcggcctgcgcgatcgcctgcttcacggcatccgacagattctgctcactggagatctccacccggaaaacggccatttcagcctcaggggtccgtgtcagattggtatattccccgtcgtaccacacgaccagttccggacggcggaaccctttcgtccgcagcaactcctgtgcatcgacggcttcggccttggtcgcgaaaccacccgcgaaatagcggtaacgccccgcgtcggtcttcaatacatagagcggagaagcattacggaaaatggagatattctgtttgtacttatactccccgagcaggattcggtagatcactccgtgttcatagacaggacagtccggaatcggctttttatacgtatagcgccccgcaacaaattcgaccggttcgtaatcgaggaaatagcgctccgtaatctccggcttcggaagacgaaaatctatcgtctgaagctgtaaagccacccgcttcaaggaatcggatgcaagtcccaaccccagcagccgggcgatttcccgctcataatccgtcaaatagcatttccggatataataatcggggagcgcatcgacaagcccttcggcctgggccgcagacatctgccgccgcacatcgtccaacgccttctgctgacgtgcctgctggtccctgcaattcaacttatccaggatataatcgtaagcatagctcttgttatcatacacatatccccatacggccgtcagcgaatcccgcaaaacccggcccaggttggctaccgtgcggtaacgaccgaaaagatcgacagccgcctgctccgtacgaacggtatcgtactgctgcttcaaaagagtctgctgccggtagttctccagcaggcgcccggcacatccggccacctccgcctccatgcgctgcgcccggagcagagcctcgtaatcacgtgccggaagattctcacggaaataaccgttgaacacgagattccgactctgctgcgattcgggagtctgcgtgataagagatttttccgtttcggccgccggaacataatcgggatgttcggtcagccaagcctgctcgatggcgttgatccgggccgcgacctgcgtacggagtccctgggcagagagcatttcgctttcgagcgcaagaatttgagcgccgtaagtctcctgtgcggccggattttcccgcagcatcgcacgcagtcctgcaatccgggtctgcatctcgtcgatccggacctgcaaccgactgtcctggtcccgaagcgcaacgtattccgaattcgactgcagggcaggaataccgggccccgccgggtcggaagctcctcgcacgataacgaccgagaaggtcaaaaacaaaccgatcaataatttacgccacatcatttccaccatctgattaacaagaattgcaacaatccgaatatctccagacgtcccaacaacataagcgccgtgaagatgaatttcacgatcgccggcaagtcgccgtagttggccatcgaattaacccctccaaatcccgggcctacattgccgatagaagccacgcaccccgaaaaactggtcatcagatctacgccgaaaagcgtacagagaatcgttccgatgagaatgagaagcaggtaggccacgatgaaaagtgacaccgtatgcagcacgcccgcttcctgaatcacaccgtccatcttgagccggatgacggcattcggatgctgctgctgcttcacccggatgtaaagcatcttcagagccatcaatgcccgattggccttcataccacccgacgtggaacccgcacaggcacagatcaacgaacccaatatcagcaaaatgattgcgaacggagtccacaggttggagtcggccgtagcgaagccggaagtcgatgttacggaaacgaactggaacgacgcgaaacgcagcgatgaccagaacgtaggataaatatcggcgatatagagactcagggcgatcagcaggcttcccaaaatcaacattccgagatagaacaaagtgacttcgctgcggaagatattgttacgcttaccggtaacggtcgcatagatcaaaccgaaatggatgcctgaaatacccattgcgaagatgagtaccgtgtcgatcatcgcactgtcgtaaaaggcgacactggtatttttggttccgaacccgctggtcgcacaggccgacatcgaatgacatacggcatcgaaccagttcattccggcgaatttcagcatgaaagtgaaaaatatcgtaagtccgacatagacgaacaacaggatctgaaccaccatctgagccctgtaacgataattgtcccgggccagggtggacatctcgacactcgaaagcatcattttgctggtacccagtgcaggcaggattaccagcgcgaacatcaccacgcccatacctccgacccaagtcgaggacatccgccagaactgcaatccccggggcagcgcctcgacattttgcaaaatcgaagatcctgtggtcgtaaagcccgaaacagtttcgaaccaagcatttatcacgctgaactcaccgccccagatcaggtagggaaacataccgacgacgcaggcgagcaaccatgaaccgaccacgatgcaaaacccctccttattggtgatccgatcctgcttttccacgaaaatgagcgggaagccccccaacagcgccgtcagcagagccgagagcagcaacgggtaaaacgcggaatccatgtagttgacataggagatccctgccgaaacgaacataaagaacgccaacaacagcataatcattcccacgtatcgcaatatcacattgacccgcatgactctctacgctttattttgtttcagcatggcgacgagtgcctcgattttttccttgagttccaggatttcgtccttacactcggctttcacggcaaagggtatcctgaaggtcagatactgtccgagccccttgttcatcgccacgatcggattgacacagtagagcatcgtaaagtaaaagagcatcaacactgtagcgatcatcaccaccagcgatatcagcacgggagtaacggcccggtaagcgtttttcttgagctgctcggcccgcggagccagcgaactctgcgtcgaagtcatatagtcccgaaccgccgtgacgaccttttcgtactgtttttcataatattcgttgtaccacacctctcccgactcgtcccctgccttcggggattcggtcgcgagaaacatcttggtcagcaccagcaactcggtagtcgcacccgtcagggagtcgagcgccgagcggtccaacgcccccttctgggccgtagccactgcgtgctccaaccgctgcattcccgtacggcacaggctgtcgtaactcgcatcctgcaggatcgccagatggacgatcgccacgttttggtcatgcacggcaccgagcatctccttggcgagttccatattccgctggttggctttcaaaatctcctcggtatcataactcagatgactcagctccaaaaaagagatcatccccgaggcgaacaacaacccgacgatactcaggaaagcaatggacattcttcttcgaattcccgtcatacgcatttaactgttaaaatcgtcccaaaccgcccgtatcggcagggcagtccccccacccgaacatatccggagcgatgcaacaaatataatgcaaggcaagggcaaaagcaaacttgtttgaatcttaccgagctacaagccgtattccgaaaaacagttcaaggcgtaaccaataccgaatccggcagactacaccgcaactcgttcttacaaaaacgaccggacggtacggcaagcccagccgccgcctcccgcccgaaatacaggccattttcgcaaaatacaatgcggcccggaggcaaggccgcatccggccggaatgctgaaacgaaattcacccgaaccttcgcctgatacaaatatacgaagaaatcgctaattatccacgatttcgccttcgagatcgttcgcatcgtccatacgccccagccgtacccggcaaatcgtgttgatccggctccgatcgtagaggaccttgacccgacggtagttgcccgtatagccgaacatcatcccgccccgcatcgtgctctcgaacaacacctcgtccgtcgtaccttcggcccgggcgcagaattcgccgtgcagccggcggcagagcttttccagctcctccacacgccgtgtagccaccgaaggctgtaccttgtccggaaaatcgacggccggcgtgccggaacgctccgagaaggggaaaatatgcagataggccggtgcgaggcgctccaggaactcgtaggtcgtacggaaatcggcctccgtctcaccgggaaaaccgacgatcacgtcgatcccgataaaggcgtccggcatcaggcgccgcacagcctcgatccgctcggcgaattttgcggtcgtatagcgacgtcgcatccgtgcaagcacactgtccgagccgctctgaagcgggatatgaaaatgatgctggaatttaggtgacgaagcgcaaaacgctattatctcatccgttaaaagattcggctctatcgaagatatacggtagcgttcgatgccttcgacttcgttcagggcccgcagcagatcgatgaaccgctcacccgtcgtgcgtccgaaatcgcccgtattgatccccgtgatgacgatctcccgctgtcccgcagcggcgatttgctcggcttccttcaccagatcggcgatcggcatattgcggctggcgccccgcgcatagtggatcgtacagtaggcgcacttatagtcgcagccgtcctgcactttcaggaacgcacgggtacggtcgccgctcgaaaaagcggcgaagaaattggtcagttcctccacatcgcaactggtgaactgtgcgggtcccttgccagcaagagccgctacacgcctgaaaagttcgcccttgtcgttgttgctcaacaccagatcgaccccttcgatcgaagcgatctcctgcggtttgagctgggcatagcaaccggtgacgacaataatcgccgccgggttgcgccgatggattttacggatcaggttacggcatttcttgtcggcatgttcggtcaccgaacaactgttgatgaccgaaatatccgccgcttccgaaaccccgacccggatgaagccgcccgcttcgaattcacgggcgagggtagagctctccgaaaaattgagcttgcagcccaaggtgtgaaaattgactctgcgtcgctgcatatttctgctgtaaatttgagcgaaagtacgaaaaactatgcgaatccgaccattttatcggcaaaaatcacacacgtccggataaaaaacaggggcgccctgcaacgggcacccctgcggcatacgtaaaacagagcggtctattcctctctcacgggttgcatcacggctccgcccgcaggctgtacgggccggctttcccacagactgccgaaagatctcatcgaccgacaactgccgcgcgtgtacatggcggacggcaactgcggtttgttatcggtcttgatccactgcagggcaaggtatccgagctgatccatcatcgtaccgaattcacccggataaatcgccgaatcatcgatttggacatcgggtgtgaagccatccgagtaatcccggaagcccttggcattttcaatatagaacgaaacggggaaaagcaggaaatcgtaattgtgaaacgagcggaccacaccttccatacctacgttcttaccgttagtgggcatcccgataagattgacctcaatatcaaggccgcgcagaccgttgatgaccatttcgctcgccgaagcagtcgtttcgctcaccaggacatagattttcttcaagcccaaagcatgttgcaaggctctttcgatcggttcgtacacgctttcgaacgtctccttgacgccgatcttgtagtcgccactctctccggcctccgtgcggtcctcgttgaacgtcatatgagcatagagctgtcccttgtacgcctcacctgcgataagcgtaccgagcacagtactcgaaagcacatcgccaccgttgttgtaacgcagatcgaggatcaggtcggtgacattctgtgcacggaaacggtcgaaagcggctatcaactcctcatcgtaatcgacatcgaagcccatatagagcagataaccggccttcttgtccgactcttcgatttcgaccactttatccatatagatagccggactggtgaaggtcgcacttccgagttgcacattccctttcggggtgagcacaggagtaatcccgtcgtcggtccacgagacactgttcaccgtaacctcgaccgcaccgtcgtacacggccctgcccaaactctgatagttgctttcggttacctcctcgccattgaccgccgtgatgaagtcgccgcgcacgagtccgacctccgcagccggtgttccgggtatgacgaccatgaccacaattccgatataatcgtccccgaggcgggtcgcatccaacagatagatacccgaaccgatatacgcctcgccgggagcacgcgacaggggcgcatcgctttccagacgcgaatagtaatacatacgtttctgcccctgccaatgaccgtcttcgcggttcacatcgtcctgggcggctacaccgtcgagaatcgaggagaaaaagaagtcataacaaagactgtaatcgagcgggacattctcgatggcacgattccagagataacggctcttcatgtactcggcaacccattcgttcacgctgcggtattttccgtccccctgctcaattaatcctttgccctgcttcaccacgaacgaaaccggcgaagcatatccccacacactgacggtaatcgtcgcggaacgagcttcggcccgggtatttttggcaactttcagacgcagcaacgattcgcccgccatacccgaaccggtttgcacttcgcaccagtcagccgaactccgggcagtccaatcgcttgcggcggcaaacgtgtaattaagcaccccgccttcgatctcgacctggttttcggcactccaggctgcatcggcgattccattgcccgcaagaagctcttcatcgtcgctgcacgacacgccggccgtcagcaccagcagtacgaccagcatccatccgaataaattcttcataacacaagttttttaggattaacgcatcaatcgttcagccacagctcgacggttgtccactgcaggtgacgctccgaggtttacggtcacgcgctcgggcatggagagatgtcgcacgctcttcacggcaacagactcgggcccctgatcggcatcgcgcttcagcacgatctcttccgacgctgcgaacaccatgtctccccaccactgactcgtacccgacaacacaccgggatagaaagtaaaggtaccgtagtcggtttcttcgaccaacttcttgatcgtcacagtcagatcatccgacacctcgacagggaagctgcgtaccgcatccgtatagcggtcactagtcggacgtttggcgaaagcgtggaaatagtattgcttaccatcgaaattcaacatcgtataatccagttcgtcgttcacaggaagactcgtcgaaatcgtttcgtcgctgttgaactcaatgaaccacttcggtccatagttcgcattggcctcctcttcggtcgctgcccagccgttggtgagcagctcttcggggctgacataatccaccccgcacggtgcgaagcccagaacgaccagacggttcagatcggaataagctttctcggtagcttcgttcacacccgtagcgatggtaacggagaaagtgacgggatcaccgttgctatctttggtcgtcgcagtgtatctgccgggcagcttcgcacgcagctccccgccttgctgcggcggtaaaagggtagtgaactccactatttcgaaaacgcccacaccttctgcattggccgcataaacgccgaactcgtactcggtattgggcagaagctccccactctcgatgacaagcccctcttcgctcatggccgaggccacctcctgttcggtaagctgcgtaccgttgttgtaaatgacatcgccggccgtaagattctcattaccggggcggccgagcacttcgtcgatggagcccttcgggaaaacaccggccgtcatcgctaccgcataagtcgcattgaccttgaaagcggccttgttccacggagtttcgacagtctgtgtttcgacggccaaagtcggtttcgggcctgtaggctctcccgtcgtgaagtcgtaaagcagaaccttttcgcgcaactccttgtcgaagcccacgatacccacctgatattcggtattgggtttgagtcccgtcgcattgacggtgatagctttcgtactctcgttcgtaaaattgtcccattcaccgatgatcatgcgacgcacggaagcctctccctcgaaagcggtataatcgaaatctgcccgagaagcaaccaaatagcggaaacgctcgattccctcctccggctcgatagtgatatcggccgtcatcgaaccgatgttacccacggaaaccttgatgtcgtaaggcgcgacaccggccttcttggttttgaagaggagcgacttcacagccgactctgcgacctggccattctcgtccacttcaccggcaatgatgataaactccatgtcggaatagatatcctgacgataaccgactacatcgaagaaagtggtatcgaaattataggtttgatcctcggtcgcttccgcaccgaaagcacttacatacgcatgcaagctgctcccgattaaacttacgatgtaatcgtagtcggacttcgaaagacagacgtgcttgtacttggccaccccttcgggcttcatgatatggtaggagaaagaggtaagtccgacactttcgagcgtaatcatctcggtatagggaacatgcgtgtcgatcacctcggaagcgagatcgctgtaaactaaaggattgatgttgcgtaccgcaacataaagattgtattccgtgtcgccgacaagatcgttcagatcgacctttgctgttttctctccttcgaaataatggacaggtcctctttcgaagagcgcctccgcatcagcgatcgtttctgcagccggcaataaggcatagacatagtcggaggcattgttcgtattgattgtaaatgaagccgttgtacgatttacttcatctacgctgacatcaactgtgggggggggagttgtgggtctttgttttcgacaccgtcatcactgcaccccgacagtccgcacgctgccagcaatgccaatccggtcaaaccgagaaataaagatgtacgcataaatgtaaaaatttaagagattaaagattggttttgcgaatgccgaagaacctatgaacaagcattcgtattcaaatatacgaaaaaaaatgatatgacgcaccgaatattcgattttttaatgtctttcaccaaaaagcatacgaattccggtgtatgcacagcctgtcttccgaccgataccgctctctgcggcaacaaagcacgggccccgcaaatcggacggaacaaaatacggatgctgcgatataaaacggctcccggttctatttttttgtaaaaaatccgtaaatttgcaaactaatgattaccgcaccatggagtttttcaacgaccttgtccgatacagctacctcaatcacgctttttgggcgtgcatcctgtcgggcattacgtgcggtattatcggtacttacgtcgtctgccggcggctggtcttcctcagcggcggcatcacgcactcctcgttcggcggactgggcatcgctttctacctcggaatcaatccgattctgggcgcgatggtcttcgccgtcctctcggcgctggggatcgaatgggccaacgaccggggccgtatccgggaggattcggccatcggcatcatctggtcggtgggtatggccatcggcgtactgttcatgagcctgcgcccaggctacacctcgggtgacctctcgaatttcctgttcggcagcatcgtaacggtcacccgcaccgatgtccaggcgctcgccgttctgacgctcgtggtaactgtcggcacgctcctctggctgcgtccggtcatgtacgtcgccttcgaccgcgacttcgcccgcagccagggaatcccgacccggctgatctcctataccatgtcggcgctcatcgccgtcacgatcgtactctcgatccgcatcatgggcatcgtgctgctgatctcgctgctgaccatccccgtgacgatcgtcaatacgttcacgaaatccttccgcacgctcgcaccggccgccgcagccgtcgccgtcgcggggaacctcgcgggactcgccctgagctacaatttcgaagtttcgcccggtgcggccataatatttaccctgaccgttacgcttattttagtaaaactgctaactttgctcgtcaaaaaacgccgccgcgccgatgaaaaccatctataaactcgttctcaagtcctatctgggacccatggtgctgacgttcttcatcatcatgttcgtgctgatgatgaatgtgctgtggcgctacatcgacgagctggtcggcaaaggactcgaccccggtacgatcatcgaactgctctgctatgccacgatcaacatgatcccgatggccctgccgctgtcgatgctgctcgcggcgatcatgactatgggtaacctgggagagaactacgagctgctggctatgaagtcggcggggatgtccctgcccaaaatcatgaagccgctgctcgtggtcgtggggctaatctccatcggcagtttcttcatcatcaacgacctggtgccatacgccaacaaaaagttttttcgcacgatctacgacattcgccagatgaaccagaccctcgaatttcaggacgggctcttcttcaatggcatcgacggcatgagcatccgcgtcgggcaccaaaatccggagagcgggctgctgaccgacgtgctgatctacgacaaccgcaacgcatcgggcaatatgaccacgactgtcgccgattcgggctacatccggctctcggacgacaagcgctttctggagatcacgctcttcaacggcgaacgctacgaacagacccgaaatgcaagccagtggtacaacaaaagctcccttcagcgcaataaattcgagcttcagaaagccaatatctccatttcgggattcgaaatgcagcgcacggatgccgatctgttcaacaatgcccagaccaaaaacatcaccgaactgcaatacgaaatcgacacgctgacgcaacaggtcaattcggcgacgacacgatcctacgaccccctcctcaaagagcgtattttcgtgcgggatacgaccgtcataaccgatcggaacgactcggtggccgtggaaaaacggaatttcaggccgatagacaccatcgactccctggcgaccctcgacctgcgttccaaggaccgaatttggaaccaggccgtttcagccgcacgcaactcccgctccatgttctcgttcgacgaatcgcaggccaaaaatgcgctcaaccagctctatcgcagcaaagtcgaatggcaccgcaaggtagcgcttcccgtgaccatcatgatctttttcctgatcggagcgccgttgggcgccatcgtccgcaaaggcggactgggtatgccgatcgtaatctcggtcatcttcttcgtcatctattacatcatcagcatttcgggagagaagatggctaaagagggcacttgggaagcattctacgggatgtggctttcagctttcgtattggcgccagtcgccatctacctcacgtacaaggctacgaacgactcgggactgctcgacgtggactggtacgtcgtaaaattcaagaaaatcaaggagaagatctccgggatattcacacgtttcgctcataaaaacaaaaaataaacatagaccatgaaaaacgaaaaagtactgaatacgatagaggaagccatcgaagatttccgccagggaaaaatcgtcatcgtcgtcgatgacgaagaccgggaaaacgaaggcgacttcatcatagctgccgagaaggtgacgcccgaaatcgtcaatttcatgctcaagaacggtcgcggcgtgttgtgcgccccgctttccgaagagcgctgcgcgcagctcgaactcaacatgatggagcagaacaacacctcgctgctcggcacgccgttcaccgtgacggtcgatctgctgggcgaaggctgcaccacgggcgtttcgatccacgaccgtgcggcgaccctgcgggcactggccgacccgaataccaaaccctccgacctggggcgtccgggacacatcaacccgctccgggcccgtcagaaaggcgttctgcgccgtccgggacataccgaagccgccgtggacctggctcgactggccggactgcaacccgccggagcactgatcgagatcatgaacgaagacggttcgatggcccgcctgccgcaactgctcgaagtggcggagaaatacggcctgaagatcatttcgatcgccgacctgatcgcctaccgcctgcgtaacgaatcgatcgtagaacgcggtgaaacggccgagatgccgaccgaatacggcatgttcaaaatcaccgtgttccgtcagaagagcaacgggctggaacacatggtgctgaccaagggcgaatggaccgaagacgagccggtactgctccgcgtgcactcctcgtgcgccacgggcgacattttgggatcgtgccgctgcgactgcggcgcacagctccacgaagcgatgcgcatgatcgaaaaagagggcaagggcgccgtcgtttatctcagccaggaaggacgaggcatcggactcttcaacaagatcgcagcctacaaactccaggacgaaggactggacacggtggatgccaacgtgcgcctgggcttcggcgtcgatgagcgcgactacggcgtgggcgccagcatcatccgcgaaatggggatcaaacacatgcgtctgatgaccaacaatccgctcaagagagtagggttggagggttacggactgaagatcgacgaaatcgtaccgatcgtcatcgcccccaacaagtacaacgaacgctacctcgaaaccaaacaggagcgcatgcaccacaaactgaacctctgcaagcattaaaatacacagacattaccggggaatcgtccgaagggattttctcggttttgccgcgcccgaaatccttgtccgcaaggcatgaacggaacggatggcagaaccgcgaatggaaccgccggacagccggaagcgaatttccggacagcaatatttcaacaaaaatgaacgccaaggatttgcgaatcgtcttcatgggtacgcccgaattcgccgtgccgtcgctgcgtgcactggtgcgcagcggctacaacgtcgtcggggtcgtcacaacccccgacaaaccggcgggacgcggacagaaattgcatgaaagcgacgtaaagatcgcggcccgagagttcggattgccaatcctgcaaccggagaaattgcgcgatccggccttcgtcagtgcgatggaggagttgcggcctgacctgggaatcgtaattgccttccggatgctgccggaggtcgtctgggcgatgccccgactcggcaccttcaatctgcatgcgtcgctgctgccgcaatacaggggtgcggcaccgatcaactgggcgatcatcaacggagaatccaaaacgggcgtcaccactttcctattgaatcacgaaatcgacaaaggagcgattttaggccaagtggaaatgccgattcagccggaagataacgtgggtactctttatgacaggctaatgaccgtcggagccgatctggtcgtgcagaccgtcgaacggatcgctgccggggagatcacccctgtcgtacagcccgacgaagacgcatcgctgcggccggcgcccaaaatcttcaaaaacgactgcctgatcgactggactcaatccggaaaacgcatcatcgacttcattcgcgggctgtcgccctatccggcagcctggacccggctgctgcgagaggaacaggaggcgaattcggccaagattttcgaagcgcacttcgaagccggtggtccggaagctccatgcggcacgatcgacaccgacaaccgcaaatacctgcggatccgatgtgcggacggttggatcgacgtcctctcgctgcaattatccggcaagaaacgcatggcagcgcaagagctgctgctcggattccgcgatgcaaactcctacgtctgtcgataaaacgctatctgcaatcggaataacgaggaaatccgaagaggatttttagacgaagcatcgaatttccggtcgaacgcccggcaacaaagcaatgaataaaccgaaacgataaataaaaataagccgtaaaaatcgcataatgctcaatcggtttactatatttgtaatcggaacataaaaccattttgcctatgagaaaataacagcacttctattcttcagtacaatatgtcatgccgtccgataggatacgggtatgacaatacatataaaaagcgttagctttatttcttgctttctgaaacttcgcaactttcaaaagtaaccaagagtaaagtgtaaacgctcacgtccaacgtgggctttactcattatttggttacaaggtattgcgaagacctcagaaagcaaataaaaagtttagcctgcgttttttatatacctgtcaaacaataccattcattatttaactcaaaaaaattcctatgaaacgcctgattttcataattgcttcaatactcctcggacaaactgtctgcgcacaagacatcatccagaaaaaagatgcgacggagatccaagctaaagtgctgaaaataaccgacacggaaatcgaataccaaagatgggacaatccggacggcccgatctatacgattcccgcagaggatgtcttcaccatcacctatcaaaacggctcgaaagaggtcatctcgcatttcgattcctcccggcgatcggccgccggcaaacaacgattcggcaaattacctcgttaccagggagaagttgccttcgcatacggtttggccgtaagcgaaggtacgggcgatctgttcccccgcatcgtattcgaaacggtacacggcgtgcggatcaatccgtacctgttcgccggtgtcggactgggaatcaattatttctacaaagacctctacatctacaactactggggttccatattggagggctatagaggcggaattgtcctccccgtatttgcgaatgtgaaaggttatctgcccatttcacgcaaagtggccctcaatctgtcgtgggatctcggtgctgcaataggtataggcggttacttcaacgagggcaccgaattttacacatccatcggtcccggcgtcacgttcggccgtcagagtggcggggtgcagggcgatttcagcatccgcttccagcacatgggagaaggattgaatgccatcctgttccgcatcggaatcggattctaaaatacgtccggcaaattttcaaacacggcacaagccgcctgttcgaaattatcggcgaatccaaaccgaagaggctgtctgcaagttgcagacagcctcttcacatcatccccggcattccatcgaccttggaccaataggatcttcaagtattcgatctcttttttccggtcattcgcgggcgaatcctttcgggccggatttcgagcgatacaaaacactccaaaaacaccggctcgatcgggaagcggattatgcctcttttccctcttccgccgcgaccgattgcgccagctccgaaagaatacggacatgcacccgctcgtcggaaacaatcttattgagaagctggatagctactgtggccgactgtgtcagcttttcgggattgttttttcggatacgctcgatcaactgctgataggcggcaatcgtatctttttcggcctggatattgacccgaacagcctcggcagccgattcatattcgaccgtaaccgccgaactcgaatacttcggagtattcacgcgcccgcccagttgtccgataaaatcgcccaaacggtcgaaatgcttcatttcgacgaaagcgatccccaggaatgtttcgccaatgttttcgaagagcatccgctgttgggtgtattgaatgatagccgtcagttccgaggtaggaatagcgccgtagtaggcgtcatagaaccactcgggttccacgccgtcgttcggccgagccttctccgcttcgggataatccaacgtattatcgacgaaacgcatcgattcgatcatcgcattggccatcgtttctacattatcgagcgtagccggattgtgttttatgaactctttcatcgcttgtttaatttatggcaatcatatctctcgaagtttctcttcggattttcgaatccgacggtcgtaccgttagcagcctatgattacacggggcacttccgcataggaaatcaagccgtacatcggtcgtcgaacccgaaaaatccggatgtcgaaactccgaagatgcgatcacccgatttatcactacttacccatcagaacctcgtcaataattcgcttcaggtcgctcttcgggcgaccgccggtcatcatctgcggcatcccgctcagcgggatgaacagcagggtaggcaccgaccgtacgccgaacaccgcagcgagttcctgttcctgatcgatatcgaccttataaaaatcgatccggtccttatactggtaatcggccgccagctcgtcgagcacaggggccaatgccttgcagggaccgcaccaggtcgcgaaaaaatcgatcacggcgggacgctcgcccaggaatttccattcgcccttcgatttttcgatatcggcgaccttggtcgtgaactcctgcttattcagttgttttacagtttccatagtattgcttgtttaatgttttataacccagcgcaaacatagtgccgcaagcgataaaaaaagagcgtccggcttatggccggacgctccgatagaatatctcgaacgactaacgcaccttacggatgatttccgcaccgtgattgatagccttctcgttttcaggcagcatcttccaagcacgctccggcagggattttttcagtcccaccattacgttctccatcttaacgacggggcataccttcagataaccgcccaggatcatcgtattgaacaacttggactgtcccaaacgagccgactcggccgtagcgtcgatcgtatagatgctgatatccgtacggctcgggtgacgcgtgataccattggtgtcgtagatcagcgtaccgcccggacgaaccatcgattcgaacttgtccatcgattgctggttcaggataatagccgtatcgaactcatgagcgatcggcgacgaaatgggtttgtccgaaaggataaccgtcacgttggccgtaccgccacgcatttcaggaccgtaagagggcatccaggtaacttcgaaatcctgcattacgcccgagtaagccaaaatcttacccatcgagaggacaccctgtccaccgaagcctgcaataattaaagtctctttcatattctttgtcctcttacttcttggttaagtccttgatatcgcccagttgatagaagggcagcatgttctcttcgagccacttgttagcagctaccggcgacatcttccaaccgctgttgcaggtcgaaacgacctccacgagcgagaagccgttaccggccattgcattctcgaatgccttgcgaatcgctttcttggtctggcggacatgagccggattatatacgctctgacgcgtaatataggtcacaccgtccagatgagccatcatctcggcgatcttataaggataaccgttcaaccggggatcacggccgtaaggagtcgtcgcggtcttcatacccagcagggtagtcggagccatctgaccgccggtcataccgtaaatcgcattgttaatataaatcgctacgatgttctcgcctcgagcagccgcatgaatcgtctcacccgtaccgatagccgacatatcgccgtcaccctgataggtgaagaccaaactgtccggatgcaggcgctttgccgcagtagctacggcacaagcacggccgtgagccgcctgaatccaatccacatcgatataattatacgcgaaaaccgaacaaccgacaggcgaaacagcaatcgtttttccttccatgcccatctcatcgatcacctcggcaaccaatttatgaatcgtaccgtgactgcaacccgggcagtagtgcatcacgttctccgtgatcaacttaggcttggcatacaccaggttctcctgtttgatttctactacttctgccatattcttactttttattaatcagtttttctttgagtgcaaccagcacctcgtccggtgagaacatcataccgccctgacgaccgtagtgctcgacgggagctgcaccgtttacggcgagtctaacatcctcgaccatctggccggcattgagctcggcactcaggaagcctttcacaccgcgttttgccaagtcggcaattaccttgctcgggaaaggatagagcgtgatgggacgcagcaagccgactttgataccttcggcacgcgccatctccaccgtcgccgagcagatacgcgccgacgaaccgaacgctacgatcacgtaatccgcatcgtcgcagtcgatagcctcgtaacgcacctcattctcctccatcgccttgtatttggcctgcaagcgctggttgatcttctccatcacctccgacttcaactccagcgaagtgatgatgttgcgatccttgcgggcacctttgccgcaagtagcccaatccttgcactcttcggcgatctctgcgtcggttttgcggggacgctgcggagccagcacgactttctccatcatctgaccgatcgcaccgtcggcgaggatcatcgccgggttgcggtatttgaatgccaggtcgaaagccagacccacgaaatcgtgcatttcctgaaccgagttcggagcaagtacgatcaagtggaagtcaccgtgcgcaccgcccttgcaagcctggaaatagtcgccctgcgaaggctggatcgtacccagacccgggccgccgcgctgacagttcacaaccacgcaaggcagttcggcacctgccagatagctcagaccctcgctcattagactgacaccggggcttgaagacgaagtcatcacccgcttaccggtcgatgcaccgccgtaaaccatgtttatggacgaaacctccgactcggcctgcagtacgaccataccggtcgtctcccagggtttctcctccatcaacgtctccattacctccgactgcggcgtgatagggtagccgaagtagccgtcgcaaccgtagcgaatcgctgcatgagcgatcacttcgttgcctttcatcaattttacttctttctctgccatagtttattcaaatttttgacgataaaccgtgatgcaactgtccggacagataatcgcgcaggacgcacatcctgtgcaggcatccggattagccatctgagccacggggtaacctttgctgtttacctcggccgataaatgcagcacatcgcagggacacgaagccacgcagactccgcaacccttgcagcgctccttatcgacgaggattgttcctttaatttttgccataagacatccatttattataaattgcttacaaatgtaagcattttttacggtttgagataacatttcgtaataaaatttcacctaacgcttaaaatatattcaaaaacattctgtttcggacagataacacaccgccacgcagcaaacaaaccgggcggaaaatttctttttcaaggaatttatacctaaatttattgtgaagtattaaccttaaaatcctcaatgcgtatgaaagacaactaattttcctcgtttttcgacccggtactcaagtatatcgacaccggtaagtttttccgcgaacccttccgctggctgtatgcgatcctggcgatcctcaacctgctgacacccatcatactgctggtaatggccattaacaacgacctgtttcggtacggcggaggccggatgatcgccgcgtttattctggtctggctcgtgatcgccttcgtttcctggctcggcttccagatctggtggaaccgccgcgaaaaagtatatgcagctgcgacagcgcatgacgatttcgtcgccattcccgtattctcgcacttcatccagactttcggggaatgggcgggtatgttcgtcggtatcggcggagcactgctcaccctgatcgccgcaatattcctgaacggcgacgcctccatgcttcgcatgatgggtacgggagcattcttcggcagcggttcgctcatttacatcgtcctcaatccgatctacggcttcataatcgtcgtggtgactcgcgcagcagccgaaacgttccgtgcattggcagctatcgccaacaacacaaaaaaaagctgatcgcgctctgctgcgagggcggtactttccaccgcccgcaccattttcgacggtcgcaacaccaaatccgacggtcgcatattcgtagctcgcagttgcatctgcaattccgaactgaccctaaagaactagggacgcgacgctcccggtgaaatacaggaaagcatataattacaaaagagaaaggagaatctgttcaagattctcctttctcttttgaatcccttacgggacactatttctcctcgaaagtatggatcaccacacccgaacggagtttcggctcgaaccaggtggtcttcggaggcatgatgttgcccgtatcggcaatgtcgatgagctgctgcatggaaacagggtagagtgcgaaagccgccttcatctcgccgctatcgacacgcttcttcaactcttccaggccgcgaataccgccgacgaaatcgatccgtttcgacgtccgcagatccttgatgtcgagcaactggtcgagtaccaggttcgacagcacggttacgtccagcactccgatcggatcgttgtcatcgtacgtacccggcttcgccgtgaggctataccactgaccgtcgaggtagagcgaaaagttgtgcaacttcgaagggtggtagatctccttgcccttgggttccacggtgaaattcttctccagcgccttgaggaactgctcggtagtcatcccgttcaggtctttcaccacgcggttgtagtcgatgatgcgaagctggctcgcagggaacgtaacggccaggaaatagcagtattcctcgttgccggtatggttggggttgctctcctgacgcttcttgcccacacgggcagcggcagcggtacgatggtgtccgtcagccacgtacagagcgggaatacctgcgaaaatctcggtgatacggtcgttgatcttcttgtcgcggatcacccagaaatggtggccgaagccttcgggagcggccgtgaaatcgtaatcggccttgttgttcttcacgtagtcggcaacgatcttgttgatctcgtcgttgtcgggatacgcgaagaataccggctcgaggttggcctgctgaagctcgacgtgcttcatgcggtcctcctctttctcgatgcgggtcagctcgtgtttcttgatcttgcccgaccagtagtcctcatagtagcagcacatggccagaccgtactgggtacggccattcatcgtctgggcataaatataatagtgctcttcgccatcctgcaccagccacttgttgtcgcgccacttcttgaagttctcgaccgctttcttatacaccttttcgtcatgctcgtcggcaatcggatcgaagtcgatttccggcttgatgatgtggagcagcgagcgctcggtagcctcagccttggcctcctgcgagttcagcacgtcgtaaggacgcgacgaaacctcggcagccagctccttcggaggacggatacctgcgaacggtttgatttttaccataatattctctctttatcgtttgaaaataaggggatatttttattatttgttcacctggaagcgggtattgccggtcttgaagaaatcgacgatctggtttgcagcggccaaacctgcgttgatgttcgcctccgcagtttcagcacccatcttcttgggagtagcgaagaagcgcttaccgaatttctcactcatctcggcggcagcctcgggagcgatgtcggtgatatatttcagatcttcgcgctcggtcatcgcctggatcacccctgcctcgtcgatcacctccttgcgggcggtattcaccaaggtagcgcctttgggcatcgaagtcatcagcttgtggccgattgatttcttggtttgctcggtagcgggaatatgcagcgacaggtagtcggcctgtgcataaagctcctcgatgctgtccaccttcttcacgccgtcagcctcgaatacctttgcatcggtgatgaaaggatcgaaagcgatcacattcatacccagcgccttgcccttacgaccgacgagcttgccgacgttgccgtaagcatggatcgccagcgtcttgcctttcagctcgctgccggtacccggtgtgaactggttgcgggccatgaagaccatcataccgagcgccagttcagccacggcgttcgaattctgacccggagtattcatcaccacgatacctttagccgttgcggcagccaggtccacattgtcataaccggcacccgcacgaacgacgatcttgagattcttggcagcttcgatcacctcggcagtcactttatcgctgcggataatcagggcgttggcatcggcaacggctgcgagcagctgggccttgtccgtatatttctccagaagggctacttcgtaaccggcatccgtaatgatcttcttaattccatcaacagccttctttgcgaaaggcttctcggttgcaattaaaactttcatatcgttgaattttatttttcgctccccatgcccggcaggggaggtagtcccatcctctttccgttcatcgaaaacgtccattaatgtataaaaatctatggcgccgtcctccttacgtttcggcgtaaaagtaaagaactgcgccatagatcaaatccggttaattatttcttgtggttcttctcgaactcctgcatgcaggcaaccagcgcatccacgctctcctgcggacatgcgttgtagatcgaagcgcggaaaccgcccaccgaacggtgacccttgatgccgaccatgcccttctccttggcgaaagccatgaattcagcctccagatcctcgtggcccggagccatcacgaagcagacgttcatcatggaacggtcttccttcacggccgtgccgacgaacatcgagttgcggtcgatctcgttgtacagcgtctcggccttcttcttgttgatcttatacatggcctcgacaccgccctgtgccttcacccacttcagggtttcgtgcattacgaaaatcgggagtacgggaggcgtgttgaacatcgagtggttgcgagcctcttcgggatagtgcgtagcgtaattgaccatcgtctgcaacggacgctccgagctgccgatcagatccttgcggatgatgacgaacgtcacgccggcaggacctacgttcttctgcgcaccgccgtagatcataccgtacttcttcacatcgaccggacggctcatgatatccgacgacatatcggcaacgagcgtgataggagaatcgatatcctcgtggatctccgtaccgtagatggtgttgttggtcgtaatgtggaaataatccgcatcggtcgggattttgtaacctttcggaatataggtatagttcttatcctcggaagaagcgacgatctccacttcgccgtagaacttagcctccttagcagccttcttcgcccaaacaccggtctggaggtaggcagctttctttttcagcaggttcgccggaacctcgaagaactgagtcgaagcaccgccgcccaggaacattacggcatagtcgtcgggaatgttcagcaggtcgcgccacaactgctcggtttcggccatgatacgctcccaacccggagtacggtgagaaatctccagcaggccgatgcctgtgttgtcgaaatcacggatagcctcaatggcagattctaccgcctctctgggcaatacgcagggtcctgcgttgaaattgtgctttttcataaaactttaacagtgattaaattatagctattatttcaggtattcttcaaaattgcacacaaatataggaattatttcaccaatccgccaaggaaacccgataaattttccctgcaccggaaaagggagcgcaacaaggccggaattaaattgtttttactaaatttgcacgaatttaaccttcgacgaaaccgacatgataaaatccatgacgggcttcggcaaagccgaagtcgcaatccccgataaaaaaataacggtcgagatacgcacgctgaactccaagcagttggacctcgccgtcaaactgccttcggcctaccggcccctggaatacgaaatccgggctctggcggcgaaagctctccagcgcggtaaagccgatctttacatatccgtagaatcgaccgcccggcagacgcgtgcctgcatcgacgaagagctgttccacttatattataaccaactgctgaaaatctgccgggaacaaccggaaatcggcactccgggcagcgcggagaacaatgctctcatccagtcgatcctgcgcctgccggacgtggtatgctcgcaggaagaaactgtcggcgaccgggaacatgaagccgtaatggaagccgtagggcaggcgctcgcccatctggacgagttccgcacgcaggagggagcaattctgatcgccgatcttttgaagcgcatcgaccggatcgaagcgtacaaacaggaggtcattcctttcgaaaaagcccgcacggaagccatccgcgcccgcatccgggagagtttggcgcagttgcagaccgaagtagataacaaccgcctggagcaggagatgatcttctacatcgagaaactcgacatcaccgaagagaaggtccggctcaccaatcactgcaactatttccgggaggtcgcagcctccgaggagtgcgcgggccgcaagctgggcttcatcgctcaggagatgggccgcgagatcaacacgatgggttccaaagccaacaactccgagatacagatcctcgtggtcaagatgaaggacgaactggagaagatcaaggagcaggttctcaacatcctataaccgacggcagacgatgggcaagttagtgatattctccgctccgagcggttcgggcaagaccacgatcgtacgggagctgctccagcgattcccccggttggaattttccgtttcagccaccagccgggcaccgcgcggaaaggaacggaacggcgtggactatttcttcctctcccccgaggagttccgccaggccgtgcaggaagataaattcgtcgaatgggaggaagtttacagcgggacctgctacgggaccctgcgcagcgagatggagcggatctggcaaaaaggcaacgtaatcgttttcgacgtggacgtgatcggagggctcaacctcaaacgtatcttcggcgatcgggcctgcgcgatcttcatcatgcctccctccatcgaaactctgcgcgagcggctcgtcaagcggggcaccgattctcccgaaaccatcgaatgcagagtagccaaggcggagttcgaactcaccaaagctcccaaattcgaccatgtggtcatcaacgacgaccttgcccaggccatcgaggaggcgacccgcatcctctcggattttctcgcccgataggatacctgcaggtaaaacgcgctcaaaatccgacggatatgactccgaacctgttccggtgctcttcgcggatcattcccggcccggccggaaccgaacgaaaaaaataaacgacaaaacaaacaataccgtgaaacacgtaatgctctacttcgggtccttcaatccgatccacaagggccacatcgcgctggccgaatatgcgatcgaaaaaggactctgcgacgaagtcgtactggtggtttctccgcaaaacccgctcaagcccgccggacagcaggctccggagctggatcgcttctcgatggcggaaaccgcatgcgccgcatcgaaatatcccgacaagatcaaaccgtcggtcatcgaattcatgctcgacaaaccgtcgtacacgatccacaccctgcgtcacctgacggagaactacggtacgcagatgcgattctcgatcctgatgggcgacgaccttgtgccgcaactgcccgaatggaaacagtaccgcgaaatcatcgacaactatccgatcttcgtctatccccgtaccggacagccgctgcccgacctcggaggacgaatcaccctcctcaaaggcgcaccgctgtatccgtactcgtcgagcgagatccgcgagcggctcggtcgcggcgaagatgtcggcaacatgctccccgaaggggtgatgcaatacatccgggaaaaagacctgtggagtccggccagctacatcgcatcgctgaccgcacgcctcgaagcgactcccgacgacgcctccctctacgtcgaacgcggccagtggcactaccgccgcaacgaatggggagaagccctcaacgacttcaaccgggcactgcaaatcgatcccgaccaccgggaggcccggcaattcgtggaaatgacctatgaaattctttcgttccggcatacggacatctacaacccctgatatgaaacgactcaacattgccctgatggcgggcggcgactcctcggaacgggagatcgcgctccagagcgccgcacagatcgcatcggcgctcgatcctgcgaaatacgacataaccctcatcgacctgcacggccgcgactggcactacacgtcgcccgacggacggcaatggcaggtcgataaaaacgacttctcgatcaccatcgacggcgaccgcaaaactttcgactactccctgattctgattcacggcacaccgggcgagaacggccgtctgcaaggttacctcgacatgatggggattccgtactcctcctgttcgatgacctcgtcggtggtcaccttcgacaaaattacgaccaaacgcaccgtagccgaattcgggattccgctggcccggggctttttcttcggccgcgacagtcggatcgatccggaggagatcgtccgcacactcggccttcccgtattcgtaaaacccaatgccagcggcagttcgttcggtgtaactaaagtaaaaagcgaagcggatatcttgcccgccgtcgccgaagccttcaccgagagcgatgaaatcctgatcgaggagtgcatccggggtcgggagatgggatgcggcatgctgatcgccaaaggcagggagtacatcttcccgatcacggagatcgtttccaagaaagagttcttcgattacgaagccaaatacaccgccggctgctcggacgagatcaccccggcggacatcgcgcccgaaatcaaggccgaactcaaccgcctgacggcgctggcctacaaagcctgccgctgccggggcgtggtgcgcgtggatttcatcgtcacgcccgagggcaagtcttacctgatcgaactcaactcgattcccggcatgagcggcggcagcatcgtccccaaacaggtgcgcgaagccggcatgacgctcggggaactgtacgacctgattatcgaagacacttatgatcgagatagacgataagatcgtcagcgccgacctgctgcgcgattgtttcgcctgcgacctggcggcctgcaagggtatctgctgcgtggaaggcaacgcgggcgcaccgctcgaaacggacgaagtcgatacgctcgaagaggagtatcccaactataagccctacatgacgcccgaaggcatccgggccgtcgaagcgcagggatttatggtcgtggacgaagacggggactacaccacgccgctggtggacgacgccgaatgcgcctatgcctgcacggaagaggggatcaccttctgcgctatagaaaaggcgttccgggagggaaaaacgacttttcgcaaacccatctcctgccatctctatccgatccgcctgatgaacttctcgaacggcacggtcggactcaactaccaccgctggtcgatctgcgaaccggcacgccaatgcggaaaacggctcgggatcccggtgtacaaggcgcttcgggagccgatcatccgtcgcttcggcgaagagttctacaaagcgctcgaaactgcggaacaactgctcaagaatcaatagagaaacaacgacacgaaatgaaaaaccgacatatcatcgctgccgccttgctgctgctcaccacgacggcagcggcacaggaccgccatacggagacgaccccggacaccggtgaaaacctgcaaacgacaccgaatgccgaacagctccgccaacagatcgaaacgctgcaacggcagctcgacctgctcgaaaaggggcgggacaccctggccgcaaagaaacccgcactgctttccgatcccgtggaacccatcgccaacatgaacggaatcatccccctggacacgctgcaaacgatcaacgaagcggtgaaaatcgtcatttacaacgacaattcgtggaaatacgtccgcgacagagagtttgtcaaggacagttcgatctacaccaaatactgggacacgggcacgctgttcccgtacaaggaatatccgctgtcggagatgcctgcatcgcttgcgatcgatctggtggattcgctcaagtgctatcattatccccacaagggcagcatccgctccaaatacggcatccgccatcgccggcgacatcagggagtcgatattccgattaaaacgggcgatcccgtttatgcgactttcaacggccgggtccgcatctcggagtacaaccggggcggttacggcaacctgatcatcgtgcgtcacgacaatggtctggaaacctactacggacacctctccgaacggctcgtgcaaagcggcgaatgggtcgaggcaggacagatcatcggtctgggcggttcgacgggccgcagcaccggcccgcacctgcatttcgaaacccgttattacggacaggctttcgacccggagcggctgatcgacttcgaatcgggcattctgcgacgtcagacattcctgctcaagaaatcgttcttcgacatccggtccaacgccggacaggatttcgatgacgaggcggaagtggaaaaggccgacaaaaaggaggctgcggaaagagccgccgtaacttaccacacgatcaagtcgggcgatacgctcggcgccctcgcacggcggtacggcacgacggtatcgaagctctgttcgctcaacggtatcaaatcgaccacgatcctgcggctcggacgcaagctccgggtccgctaaacaaacagacgagccggaacagggcggggtgtggtatgaaactggctccgtaccggatgatgcgactccggaaacaaattatcaaatagctaataaaaattaggcacatccgctcattactttttctttgaacctatgattccgaatgagcggcacaccgcgcgaccagtcggcgtgggtgctcgaagagtttcctgaccgcccgaacgccgtccgttggacctaccagattaccgacaaggactataaggaggccgtgcgtcagacgctcgaacgctgggcagaccgggacgaggaaaaacaatagggcaaaagcctttgcgaaacaaggcttttcccgacttatttccacataagcgggccgcagtatcgctactgcggcccgcttttttactgccgattcttcccggcggcacggccgtttcgatatggctctcggatcatttggaataatcgcgggcgccgaaaatcagcgaaccgatacgcaccagcgtcgctccgtattcgagagcgatccggtagtcgtgggacattccgatcgaaagggtatcgaactccggcccgaaatagggcgacaactcgctcttataccgttgcaaagcggcgaaatcccgccggatgacctgctcgtcgccggtgttggtcgccacgcccatgacaccccgcacccgcaggttgggcagccgtgcaaaggcgccgctgcgaacgtattcctgcaattccgcccactcccagcccgatttggactcctcgtcagccacgtggatctccagcagtacgtcgatcgtacggcccgcagcggcagcggctttctggatcgcctcggccagccgaacgctgtcgagcgaatggatcatcgccacgaaaggcacgaccatcttcactttattggtctgcaaatggccgatcaggtgccattcgatgtccttgggaagctcctcgtacttctgagccatctcctgaggccggttctctccgaaaatccgctggccggcttcgtaagcctccatgatccgctgggcagggtaggtttttgaaacggccaccagctccacctgcccgggcaaggagcttttgacccgcaatatccgatctgctatcgacatcctacaatctctccaattttacagtgaagtgacgcatcaattccgtctcccagacgattttaacgcctcgttttatttcgtcacgacgatcgtaaacattttttagagccgctgcgattacatccatatgattgttggtataaacacgccgagcgatacacaagcggagcagatcaaggcctccaaagcgattttcacgagttacagggtcacggtctgcgaggatataaccgatttcacaaccacggataccggcctccaaatacaactcgatagcgagagtttgcgcagggaactcttctttcggaacactcgagagcaccttgtcggcatcgacaaacagcgcatgacctccgacaggtctttgatagggaataccgtattcatccaaacgcgccgcaagatattgaacctgtttgatacgtgtttcgatattatcaaactcggtattttcctcaagaccaacggccaaagccgccatatcccggccgttcatacctccgtaggtaagataaccttcaaaaggaatacagaatttttttgcaccttcataccagtcttcatgcctggtagcaataaaaccgcccatatttacgaggccgtctttcttggaggacatagtcatgccatcagccaaagaaaacatctcctttacgatctccttgatggtcttgtccgcatacccgtcctcccgggtcttgatgaaataggcattctccacgaagcgtgccgaatcgaaaataacacgtttgccgtatttgtccgcaagggcgcgcacctcccgcaggttttgcatggaaacaggctggccaccggcggtattattggtgactgtcacgatgatgaaaggaattttgtccttatattgcttcagggctgtttccagttttgcaggatcgacattgcctttgaacggcacttccaattgggtgtctttcgcctcatctacagtacaatcgagcgctacggctttacggctctctatatgcccctttgtcgtatcaaaatgcgagttgcccgggacaatatctccgttatgcaccagatgactgaaaagaacattctctgcggctcgtccctgatgggtcggaattacatattcaaatccggtcagccgggtaatggtatctttcaacagaaagaaagatgaagagccggcataactctcatctcccatcatcatcgccgcccattggcggtcgctcatcgcacccgtacccgaatcggtaaggcaatcgatataaacttgatccgcttttaattgaaataaattgtagtgagcttctttgatccatttttcacgttcttgtcgcgtacttttacggataggttcaaccattttaattttccatgattcagcaaaaggcagttccataatataattttttactaattaatagaattaaaaaaagatttttattagtacatacgataacaaagatagtgaaatttgcgatattaaaaaagaaagaagaagtaaaaatttgttttgattcttctttcttttacaggcagacctacagcacggagcgggacaaccgctcttccggccggtaagccggcgacggctaccagccgccgcccagcgccttgaacagattcacataattgatatactgttgagctacgaggttcacatattccatctgcgactggtacatgtttctttcggcgtcgatcacgtccagataggccgacataccgttgcggtagagcgaattggtcatcgtggcgatctcgatattggcccggagcaaccgggcgtaattctcggcctggctgcggtaggtagcgatgtcgagcaggctcttttccacatcgcccaacgcttcgagcacggtctcctcataggcgaacacgctctgataatatcgctccctggcaacctgctcctgccgcttgagcttgccgaaattaaagatcggctgcacgagcgacccgacggccgaccacgcccacgaatgaccgtcggaaataccttcgatcgaactggaaacgatacccccggctccggtcagcgtaatcgacggaaaacgcttgctacgggcaagccccacgttcgcggccgcctcatccatgttgaacgaagcctccatgatgtcgggacgccgctcgagcaattccgaaggaagtccgacgggaatatccattacctgataattgtccagcaaggcatcgtcgaaagtttcgtccccgaaataggagggattctcgccgagcaggacacaaagggccagacgcgactgctcgacggcacgctgatactgcggaatatcggcctcggcctgatagacgaggctcatggcttgctgaagggccacgccgttggacatgccgtaacgggcgagcgaatccacgagcgccgccgactcccggcgcagcacatagctctgccgggcgatccgcaggtcgcgggtgtattgaagcacggtaaaataggaggtggcgacttccgccgtcagcgacagcatcacgccccggtagccccattccgaagagtagagagctgccttagccgcccggttagcgctgcggagtgttccgaaaaggggtacttcccaggaaatcgacggttcgatcgtatattgttgggtcgtaccggtcggctcggtatagtttccctgcgccgagacgttcagtcccaccgagggaagaaaaggcgcacgggccacagcgatattggcgcgtgcttcgaagatacgcgaagccgcctgcgccagattgcggttgttttcgagcgcgtgctccaccaggcgattgagcgtcgaatccccgaaaatctcccaccaggcgaaaggcagcgacaccgaatcctgcggaaaatcgcccgcgaagcgataattctcaggcacttcgacctgcgcgtcgtagagtttcggagtgcacgatgccagtgcggcagcgaacagaatgattgcaaagtatcgtttcatgactctttttgttttaactcccgcttgcgttcgaacttgccgacacgggcaaccagataatacagagcagggtagatgaaaatgcccagcatcgtggcgagcaacataccgcccaccagagccatacccataatattgcgggccgtagcatagaccccgctggcgaagatcagcggcatgacgcccaggatgaacgagaaggcggtcatcatgatcggccgcatacgcagcctcgccgcctcgatcgtcgcggccttcaggtccatgttcttctcgaagaagagctgatcggcatattccacgaccaaaatggcattcttggccgaaagaccgatcagcatgaccaacgagatctgcatgtagatattattgataaactcggggctgaccaggtacgccgcaccgacaaataacagtgcgccgagcaccgcgagcgggacactcaacaggatcgccagcggcagcccccagctgttgtagagggccgaaagagtcaggaacacgaagacaatagccagcaggtaaacggcgccgctgctgcccgaagccgtcttttcctgataggataagccgctccaggtggttccgaccgcctcgggcagcacgtcggcggccaccgcttcgatggcgtccatcgcctgaccggtcgaaactttcgcggcgggattgaccgtcagctcgatcgaccggtagaggttgaactgcgagacgaattcgacacccgtagtatcccgtacggtcgtgaacgacgaaacgggaatcgagttgccctgaccgtcgtccacgaaatagctttcgagcgaatacttgtcacgacggtactcgggcgcagcctggatataagtctggtaaagttttccgaaccggttgaaattgttgatataggaaccgccgagcagagtgctcatcgtcttgtagaaactccggagcggcacgccctgtgccagcgctttctccttatcgacttcgattcgccgctgggggatgccggcgttgaactgggtggtcacggagccgatctgcggctgcttgcgcagcgaatccatgaagcgcatggtttcgtccgccaggaactccgtaccccggccttcaagatcctgtacctgcaacgtaatgccggacgttacgcccaaaccggggatcgatggcgagataaaggcgtagctgacggcctcgggaactgccacgtacaactcctccgtcaaggcggaagcgatctgagaagaggtcttgctgcgctggctgtaatcgaccagcttcacgaagataataccgctgttgctcgaagcgatacccgccagcatattgaaaccggcggcaaaggaggtcgcctcgacatccggacgctgccggacgagttcatcgacccgctgcatcgccttgacggtggtttgcagggatgaagcctcgggcgtctgcacgaagaccatgacatacccctgatcctcgtcgggcaggaagcccgaaggcaggaagtgccagatcacggcgatagcggcaagggttacggcgacgattcctccggtacgcttcaggtgaccgataaaacgggtggtagccgatgtgtattcttcggtacgtttgccgaaccagcggttgaaagcggcgaagaatcccttctgcaccttcgggcgcggcttgagcagcaacgcgcacagcgcaggcgaaagggtgagggcattgaacgaagagatgcagaccgatacggcgatcgagatcgagaactgctggaacagcagacccgtgatactccccatgaacgatacgggaataaacacggccagcagtacgacggtcgtagcgacgatcggcgacgagacgctgtgcatcgcttcgacggtcgcctgcttcgcactcagccccttctcgatattgacctgcacggcctcgaccaccacgatcgcatcgtcgaccaccaggccgatggccagcaccatgcccaacagcgagatgatattgatcgagaagccgagcagcgggaagagcgcgaaagcgccgatgatcgacaccggaatcgccagcaacgggatgagcgtcgcacgccagtcctgcaggaagaggaagatgatggcgatcaccagaatcagagcgataatgagcgtaacgaaaatatccttcacgccggcttcgatactggtcgtggcatcgaccatcgaagtataggtaatgccatcggggaagcgcttggaaaggcgctccatttcggccttgaccgaattgcccacatcgacggcattgctgcccggttgctgataaatgacaagcagggcggtcgggtcgctattgaagagcgattcgacaccgtactggcggctgccgagagccacgtcagcaatatcgctcaaccgaacctgctcgccttcgggagtggtggagataatgatgtcgccgaactgctccgcatcgtagatctggggcggcatggtcaccgtataggtataagtcacgtcgcccgcagcgggttccccgccgaacttgcccgccggaaagatgccgccctgcgcttcgacagccgcaaaaacctcgtcgagcgagatcttgtagtaatccaacaggtcgggcttcagccagatacgcatggcgtattcaccggcgcccataatgtccaccttacctacgccgtcgatcttcaacagttcgttctggatgttgatataggcgtagttggagagaaaatcgccggtgtagcgtccgtcgctggtgagcgaatagacgatcagaaagccggtcatggtcttgcgcgtggtgacgccctgctgggtcaccgacgcgggaagttgcgaaagggccgtcgaaacattgttctgcgtaaaaatagcgtccatgttcggatcggatccgatatcgaaggtcacctgcagattcatcgacccgtcgttggcgctcgtagcctgcatatagagcatatcgctgacacccatgatgctctgcgaaacgggcgtggcgaccgcattgttcacggtttcggcatcggcaccgggataggtcgtcgaaacttcgacgacaggaggcgtaatgtcgggatactgctcgatcggcaggtcgaatatagaaatgatacccagcagcacgatagctgccgccagcgcaatggcgaaaatgggccgcgcgatgaaaaattttcccatacctgcctattttttaacgggaacgacccgcattccctgacgaagtttctgcaaaccggtcacagcgaccgtttctcccggttccaggcccgactcgatggcccacattccgccgaacgtctcgcccggcgtaaccttgcggtattcggccgtgctgtccggccggattacccagaccgacgatacgtcgagagtctgcacgacactctgctgcggcaccagtacacggggcagcttcgccccgatattggcttcgacacgcgcgaactgtccggtcttgagccggtaggaaggattcgggaagcggacgatcagcacgatcgtccccgtagccgaagatacggccgtccgggtgtaatcgtacttgccgaaaagcggatagcgggtaccgtccgcctcgtaaagcacgatctccgaaagcagttcggcgttgtcgtagatattcgtccgattgctgtccaaccgaaggaattgcgtcatcggaatcgcaatggggacctggaccgtatcaatattcataatcgtggtgagggtcggaatttgcgtacccggaccgacataatcaccgacggagccgttcgaagattcgataatgccgtctatctgtgcatagatcttcgtgtagcccagattgagctgggcattccgcagagcctgccgggccgacttcacgtcggcctccgaagcggcgtactgcgccgtatattggtcgagttgcgtaccgctgatggcattgatcttggccagcggcaccgcccggtcgaaattgttcttggcttcgagcgccagcgcacggctcgactccagagccgcttgagccgaaagcagggcagtgtaatactcactgtcgtcgatttcgaaaatcaactgacccttgcgcacgggcataccttttttatagtgccgggctacgagaaacccgctcacacggggttcgaccaccacttcgttatcgctgttgatctgggaaatgaagctccgccgcgtatagagcaaatcgaactcggcgacagcgatttcgatctccatcggcggcatctgcccggtatgtccggaacgggaaccgcaggaaaccgcgagcaaagagagcgcgagcaggataaagggaattgaagacgatctgtaacacatagtttctgcatttttcgaaatacacggcaagttatgtgcctcaacttgcggtcaattcaaatttttcggagaataatgtccctttcggcccctcagggcgagccgggagcccgaatccgccccccggcaggagcacagcggacagccgctcccgcctcccgtcgaaaaacatcccgtcgcatccgaaacgaacgaacggccggacaacatccggcataaatgctcccgacgcatcccgtcccggtttttacgataccggttgaattccggaaaaagggatgcggctggttttgttttatttccggtttatgctatctttgcgaaaataacttttgcccggaccggccgtattccggaaacacggaaccgcatcgttcaaggaatacgcgccgttctcactcaaaataaaaaattctcgcatgaaaaaactattccgaaccctgtttgccgcagccctgtgctgtctgacattcaaggcgacagacgcctgcaccaacttcatcatcacccggggagcctcctcggacggctcggtgatggtctcctacgccgccgactcccaccagctctacggcgcactctacaaaaccttcgccgggcgctacaaacccggcacgatgctcccggtctatgactgggactcgggccgctacctgggagaaattccgcaagcggcacaaacatacgccacgatcggcaacatgaacgaacattcgctcatcatcgccgaatcgacctacggcggacgcgaggagctggtcgattcgacgggccgcatcgattacggctcgctcatctacatcaccctgcaacgcgccaagactgcccgcgaagcgatccggatcatcgtggatctggccaacacctacggctacgcttcgagcggcgaatccttctcgatcgccgaccggaacgaagcctggatcatggagctgatcggcaagggctgcgagctcgatgccgagggtaacaacacccgcaagggcatcgtctgggtagctcgccgcattcccgacggatacgtttcggcacacgccaaccagtcgcgcatcacgactttcccgctcgacgatcccgagaactgcctctacgctcccgacgtgatctccttcgcccgtgaaaagggctatttcaacggcccggacgaggagttcagcttctgcgatgcctacgctccggccgatttcggcacagtgcgcggatgcgacgcccgcgtgtgggcgttcttccgcaccgtagcggacgacatggatcaatacacggactatgcaatgggatacaacatgtccaaccggatgcctctctgggtgaaaccccgcaccaaagtcgatcccaagaccgttttcgacgccatgcgcgaccactacgaaggaactccgatggacatgacccaggacatcggtgcgggcggacatgccctgccgtaccgctggcgcccgatggatttcgaagtggacggcgtaacctacctgaacgagcgtgcggtagcaacccagcagaccggattctggttcgtggcacaggcccggccctggctgccggacgacatgggcatcctctggttcggggtggacgacgcagcgacatcctgcctgacgccgatctactgctcggcaaccgaggttcccgaatgtttccgcgagggcaacggcacgatgctcaaatattcgcccacgtcggcattctggctcttcaaccgcgtaaccaacttcgcctatctgcgttacgatctgatcgcggccgacatccgcaaggtggttgacgagtgggagaatacccgtttggaggaggtcaaacagatcgacgcagccacagagggcgactcgcccaagaaacggcagaaacggcttacccgttattcggtggatatggcccagcaactcttcgaccgctggacggaactcgaccggtacctgctcgtcaaatacatcgacggcaacctgaagagcgaaaccgaaccgggtaaattcctcgacaacggcaacgggcgcgacattcccgacaagatccagttcccgggctataacgaaaagtggaaacgcgccgtagtagccgaccacggtgaagtgctgaaagtaattcaataaatacatacaaaaaatatgaaatacgatatcattgtgatcggcagcggtccgggcggttacgtagccgccatccgcgctgctcaactgggtaagaaagtggctgtcgtagagcgtgccgaggccggcggcgtatgcctcaactggggttgcatcccgaccaaagcgctgctcaagagcgcccaggtttacaactattgcaagtcggccgaacattacggactcgacttcgcaggcgaagtgcggcccaacctcgaaaagatcgtagcccgctcgcgcggcgtggccgaaacgatgaacaaaggcgtgttgttcctgctcaaaaagaacaacgtggagctgatcaacggcttcgcaaaactgaaaggaaacggccggatcgacgtggacggcacggagtacgaagctgaccacatcatcctcgccaccggagcacggccccgcgaaatgccgttcatgcccatcgacggagagcacgtgatctcctcgaagcaggcgctcgtactgcccaaactgcccgaaacgatgatcgtcgtgggatcgggtgccatcggcagcgagttcgcttatttttatgccgcgctgggtgtgaaggtcaccatcgtcgagtatctgccccagatcatgcccctcgaagacgaagaggtcgccaaaaccatggaacgctcgttccgcaagctgaaagcgaccatacttacttcgaccaccgtgaaatcggtgaaagtcaatgccgaaggcaaatgcgacgtcgaggtggaaggcaagaagggcacggaaacgctggtagccgatatcgtcctctcggccgtcggcatcaaatccaacatcgaggggatcggcctggaagagttgggcatcaagaccgaacgcgacaaagtcatcgtcgataaacagtaccgcaccaacgtaccgggcatttacgccatcggcgacatcgtacccggtccggccctggcgcacgtagcgtcggccgaagcgctctgctgcgtgaatgccatctgcggcctacactccgagccggtggactacacgacgattccctcgtgcgtattcacctcgccggaagtggcttcggtcggtatgaccgaacgacaggtcaaggagatgggtatcgactacaaagtgggacgcttccccttcaccgcttcgggcaaagcgaccgccgcaggcgaccgcgacggcttcgtaaaactgatcttcgaccagaacgacaagctgctgggagcacatctggtgggagcgaacgtaaccgaaatgctggccgagccgacgctcgccaaatcgctgggagcgacggtacagcagatcgcacacacaatccacgcacacccgaccatgaacgaaggagttatggaggcggccgaggtagctctgggtgccgcgatccacgtataaatcgaaaattaccgcaatgcgaacggggacggcctgcacaggatcgtccccgtttcatttgcatacgcccgtcaaggagtaatcgataacaccgaaggaatcatggccccgggacgatcggcgattgaatgaaaagaaaagcggccgaacgaaacaatcgaagagaaaaccacccgaacataagggaaaacaggctgccggatcgaagcgaaggcggcctctacttttccaccgatgaaaaatagcggagagcgggcagccgggtttcccgcacgaatacttccggcggatagagcacatcgctcaggaaaaggccctgggcgggtgctccggcgctcgaccgcgaaagatcgcggctggcgacgatgtcgcggaactgttcaacggtataacgtccccggcccacatcgaccagcgtgccgacgatagcccgcaccatattccgcagaaagcggtccgcacgaatcgtaaagcaaagcgtaccgtcccggccgaccgtccagtcggcccgtttgagatggcagatattggtcttgttgtcggaattgagcttggcgaacgacgtgaaatcctcgaactccatcaatacgtcggccgcacggttcattgccgccacgtccagcggtacgtaatattgccaggaagcggctcgtgtaaagggattcttgcgcggttcgatatagtagcggtactcccgctcccgggcgctgaaacgggcgtgagcatcggccgcgaccggcacgatgcggcttacggcaatatcgccgggaagcatatggttgagcttgaaaacgacctgttccggatcggcgacgggagaggaagtgtcgaaatgcgccacgtaataggaggcattcactcccgtatcggtgcgtccggcaccggtcaacagaatcggttcacggagcagggtagagattgccccttcgatcgtctgctgtaccgacggcatatcgggctgccgctgccaaccgcaataggctccgccgttgtatctcaattcgataaaataacgcatcgtttttccatttatcacatcttgcaggcagtccccgcatttcgggaggaatcccagccggctcgtcccgaatctttcgatcccgagccgagaatcacggctgatcggatctccattcgcaaaaagaatccgaacccatgatactctgcaaagatagtgaaaggtgagagcaatcgtgcgggcttgcacgcaaagattgccgaaccgcctcccatcttccgcaaagatagtgaaagccgacagaaaacgggcacttgttcccagttttccgagacgcaacctatttaagactatgtcaaagataataaaatccggaacgccaactccgctccataaaaaacgaggtcgaaacccgataggatttcgaccccgcatctatactatcccgcgattatttgcgcggcttgatgttcagtttcaccggacgaatcatattctcgggcttgagaatcgtgtcaagctcctccttcgagagaataccgtgctcgagcaccagatcatagacgccgcggcccgtagcgagagcctccttagcgatcttggtcgaattcttgtaaccgatgatcgggttgagagccgtcaccacgccgatactgttcttcacgtaatcggcacagcgctcgcggttggccgtaatgccgtccacgcagagcgtgcggagcgtatcgaagccgttcatcagcaactcggcggactcgaaatcgcactgggccatcaccggctccatggcgttgagctccatctgggccgcctcgccgctcatcgtaacgcacaactcgttgccgatcaccttgtaggcgatctggttcattacctcggggatcacggggttcaccttacccggcatgatcgacgatcccggctgacgggccggcaggttgaactcggccagaccgcagcgggggcccgaagccagcaggcgcaggtcgttgcagattttgttcatcttcacggcgacacgcttcatggcggaagcgtaaccgaccaggcacgaagtatcggacgtagcgcctaccaagtcgcccgtcaaacggatcttccagccggtgatccgagcgatgttctcggtgcacagctcggcatagcccggctcggcgcagatacccgtaccgatcgccgtagcacccatattgatcgtcaggaaatcctcggcagcttcgttcaggtgaacgatctcatcgcgcaggatgctggcgaaaccgtggaaagtctggcccaaagtcatcggcacggcgtcttcgagctgcgtgcggcccatcttgaggacatcggcgaactccgcagccttcttttcgaaggattcgatcagttgcttcaggtgctcgaccagcttcagatgcgtagcgtacatacccaggtgaatagccgtcgggtaggcgtcgttggtcgattgcgcacagttcacgtcgtcgttgggcgagcagtactggtattcgccgtactgatggcccatgatctccaacgcgcggttggcgatcacttcgttggcgttcatgttggtcgtcgtaccggcaccgccctggatcatatccacggggaatgcgtcgtggtgcttgccgtccatgatctcgcggcaggcctgtgcgatcgcattgaacttctcgtcggtgagcagccccagcttgtgattggcttccgcagctcccagcttggtaacggcgagtcccttgatgaagaggggatactcgttcaaatggaatttgctgattcgaaagttctcgataccccgcagggtctggacaccgtaaagtacgtcggcaggcaactctacgctgccgagcaggtcgctctccgtacgcattttctgattatttgccataatacttataatttataattgtttttaacgtttaagtttcgatccgtcgcgaatttaattcgacaaaattaacactttattttcaattcgtgccaacaaaccatataaacttgaaactattttttatttcggcggcgaatagctatatttgcgataatataccgtaaaatccccttcagccaatgaaagcagcgatcatcggacacggcaaaatgggccgtgaaatcgaaaaaatactcctcgaaagggggcaccgtatcggggccgtcatcgacgaggcgaacgcatcggaactggatgccgcacacctggccggcatcgacgtagcactggagttcacgacccccgacgcggcctacggcaacatccgggcgtgcatcgacgcagggattccggtcgtcagcggcacgacgggctggacaaatcgtctggaggagttgcgcagctattgccgggaaaaaggcggtgcgctcttctacgcctcgaactactgcctgggcgtcaacctgatgttccgcctcaaccgcaggctggcccggatgatggagcgcttcgacgcctacgacgtacggatcgaagagattcaccacacacagaaaaaggatgctccgagcggcacggccatcacgctggcagaagggatcatcagcgaaatcgggcggaagacgggctgggtgaatgaacccagcgacgatctttcgcaaatcgtcgtcacctccctgcgcgaaggagcggttccgggtacacacacggtaacttacgaatcggacgacgaccggatcgaactcaaacatacgatcaaaaaccgccggacactggctctgggcgccgtcgtcgctgcggagttcctctgcggcaaaaagggtgtctatacgatggacgacctgctgaaataaatgatacagaacatgggaaaaatcaaagctttcttccgcaacaagtgggtgggattcaccctagcaagtattttatacatcctctggttcgtcctctggacgggcaactggtggctgctgctgggcgaaatcgtcatcttcgacctttatatcacgcgttatttctacaagtacgtctggcggcacaacgccgagatgtgcaagaaaagcaaaagttacaaagccgtttacgaatgggtgaatgcgatcattttcgccaccgtcgtagcgtcgctggtacacatcttcttctttcagatgtacgtgattccctcgtcgtcgatggagaaatcgctgctggtcggggactatctctacgtcagcaaggtagcctacggtccccagatgcccaataccccggtggcatttccgttcgtacaccatacgatgcctttttcgaaaaccaaaaaatcgttctccgaaagcgtcaaatggccttatcaccgcctcaagggactgggccgaatcgagcgcaacgacgtagtggtattcaactttccggcaggcgatacggtgctgctcgagcgacaggacgtttcgtactacgacgtactgcggcaatatcagcaaactttcggacatcaggccggccgcgaacggctgatgcaggaatacacggtcatcacgcgcccggtggacaagcgtgaaaactacatcaaacgctgcatcggcctcccgggggattcgatacgaatcgaggaaacggcggtttacgtcaatgggaagtcacaggagcccgtcgccggaaaacagttcatgtatctggtggaaaccacctcgccgatcacccaatacgcactcgacaatctgggtatcaccgaatggagcaacaagggcacgctctactacatggcgctcaccgacgaaaacgccgcagaactggagaagctggacaacgtcgcttccgtacagaaatacatcgcccgcaatcccaatttcgatgtctttccgcaggatcgccgctatgcgtggaatcaggacaactatggcccgatctggattccccaagcgggaacggccgttgcgctgacggccgacaacctgcccctgtaccggcggattatcgaaacgtacgaaggcaacgacctgcgtgtggacgaagaagggaagatcttcatcaacggcgaacagaccgacacctatactttccggatgaactattactggatgatgggcgacaaccgccacaattcggcggactcccgcttctggggattcgttcccgaagaccacatcgtcggcaaagcctccttcatctggctgtcgctggatcccgaaaagagcttccccgcgaacatccgctggaacaggatgttcaccaaagtcaaataaaacaaggggagtcgtgacctcggacagttatcatacgcttgccgggcctgcggaagccatctacaaagagaaaagcagcaagttcctcgcttatgcctatccggtcgaaagcgaggaggagattcgcacgctgctcgatgcgctgcgcaagaaatattacgacgcgacgcaccactgttacgcgtggcggctgggtccgcacggcgaaacgttccgcaccaacgacgacggagagccttcgggcacggcgggcaagccgatcctcggtcagcttctgtccaacgaactggtcaattgcctgatcgtcgtggtgcgttatttcggcggtacgaaactcggggtgtcgggcttgatcggtgcctacaaggagtcggcggccgaagcgatccgagcggccgaaatcgtggagcggacggtcgatacggtcgtggaggtggagttttcgtacctggcgatgaacgacgtgatgcgcgtggtcaaggaagaacagccccgggtgctgacgcagcagttcgacaacctctgccgaatgacgctggcgatccggcaaagtctcgcaggaggtatgatcggcaaactggaaaaaatcgggggcgtgaccctcgaagtgaaataatatcggtccggcccggaacacgcacggcgcagggaccggatccacgtaaaaaaacatgacaaaagaacaaaagtccatttatataaaaggtgcacgggtgcacaacctcaaaaacatcgaggtcgaaattccgcacaaccgactggtcgtcatcacgggactttcgggttccggcaaatcgaccctcgccttcgacacgatcttcgccgaagggcagcgccgctacgtggagagcctctcggcctatgcccgacaattcctgggcaagatcaacaagcccgatgtggatgtcattacgggtatcgctccggccatcgccatcgaacagaaggtcaatacccgcaacccgcgttcgacggtcggtaccacgaccgaactgtacgactaccttaaactgctctacgcccgcatcggacacaccttctcgcccgtatcgggacaggaggtcaagtgctacaccgaggacgacgtggcgcaatatatcctctccctgcccgaaggcagccgcgtggccgtcgcagcgccgctgcaactgcgcgaagggcagggcgtcatcgaaaagctgaccctggtgctgggcgaaggcatcctgcgtgtacatgcggcgggagaaactctgccgatcgaggatttcctgccccgcgtggacgaaaacacccgtgccgaagatatctcgatcgtagtcgatcgtgccaaagtttcgcaggacggcgacctgccgacccgcctgcgggattccgtagcccgtgctttctcctatggaaacggggtttgccaaatcatcacgcccgaaggcgtcaaagggttctcggcccgtttcgaggccgacggcatcgaattcgagcctccgaccgaacatctgttcagcttcaacaacccgctgggcgcctgcccgacgtgcgaaggttacggcaagatcatcggcatcgacgaggacctggtgatccccgacaaacgcaagaccatctacgaggacgccgtggcctgttggcgcggagagaccatgcgggcgtggaaagaccagctcgtagccaatgcctataagttcgattttccgatccatacgccgttctaccaacttacggccgagcagaagcggcttctgtggtgcggcaacgagtattttcacggcttgaatgacttcttcgcctacatcgacagcgagcgacgcaagatccagttccgggtgatgaaagcccgctatacgggcaaaactgtctgtcccgactgcggcggctcgcgcctgcgcaaagaggccctttacgttagaatcggaggcaaaaccatcgccgacctggtcgtgatgccggtggagacgctcgccaatttcttcgccacgctcgaactggacgctcacgacaccaaaaccgccgcacgcatcctcaccgagatacgcaaccgcctgcaatacctcacggacgtggggctgggatacctgaccctcgaccggctctccgcgacgctttcgggcggcgagagccagcgcatcaacctttcgacctcgctgggcagcaacctcgtgggctcgctctacattctcgacgagccgtcgatcggcctgcacccgcgcgatacgaaccgtctggtcggagtgctcgaacaactgcgcgacatcggcaatacggtgatcgtcgtcgagcacgaagaggaggtgatccgtgccgccgactggatcgtcgatatcggtccggaagcgggctacaacggcggagaggtcgtcttcagcggaccgctgaaagccttattgaaagagaaaaaaagcctgacggccgactaccttacgggacgctgcaaaatcgcggtgcccacctcgcggcgcagcccggcagcgtggatcaccgtgaaaggtgcccggcagaacaacctgaagaatatcgacgtgcggattccgctcggggtgatgacctgcatcacgggcgtaagcggcagcggcaaatcgtcgctggccaaaggcatcctctatcccgcattgcggcgcctgctgttcgacacagggctcaaaccgggcgatttcgacgccatcgaaggcgatctttcgacgcttcgttcggtcgaaatggtcgatcagaacccgatcggcaaatcctcgcggtcgaatcccgtgacttatatcaaagcctacgacgagatccgcaaactctacgccgaccagccctacgcccagcggtcgggattcaatccctcccacttctcgttcaacatcgccggcggccgttgcgaggagtgtcagggcgagggattcatcaaggtcggcatgcagttcatggccgatgtggagctggtgtgcgaagcctgcggtggcaagcgcttcaaagatgaaattctcgaagtccgctaccgcgaaaagtcgatctacgacgtattggagatgacggtggacgatgcgatcgccttcttcggcgaggagaagaaaaacgccacctgcaaacggatcatcgaacggctccgccccctgcaggaggtcgggttggggtatatcaggctcggacagtcctcctcgacgctctcgggcggcgagagccagcgcgtgaagctcgcttcgttcctgtcgaaggagagcaccgaaggcaacgtgatgttcatcttcgacgagcctacgacgggtctccatttccacgacatcaacaagctgctcgacgccttcaacgccctgatcgcccgggggcatacgatcgtgatcgtcgaacacaacatggacgttatcaagtgcgccgactgggtcgtggatctcggtcccaaagcgggcgaccggggaggcagcatcgtcttcgaaggcactccggacgggctggccggatgcaaggagagttacacgggccgctacctggcgctccgcgagaaaaacgaataagacaacgatggaatttaccacctatacgctccccaacggcatccggggcattcaccgtcggatcaaaggcaacgtcacgcactgcgccctgctggtgaacgccggaagccgcgacgagttgaagaatcaattcggactggctcacttcaccgaacacgccctgttcaagggcacggagcaccgcaaggcttaccaggtgaactgccggctcgaaaacctcggcggcgaactcaacgccttcaccaccaaggaggatacgacgatccacgccacgaccctgcgaagcgacttttcgaaggccgtagagctgatcgccgacgtcgccttccattcgactttccccgaccgggagctggaaaaagagaaggagatcatctacgacgaaatcaacacctacaaggactctccggccgacatgatctacgacacgttcgaagacatgctcttcgccggatcggaactgggacacaatattttaggccggaaatcgagcctggcacgcttcagcggagagtcgatccgggagttcgtcgcacgcacgcacaccaccgaccagatggttttctcgtcgatcggcaacctctcggccaagagcgtcgaaacgaccgtcgcccgcttcctgaacgacatcgaaagttccgcacgggatttctcgcgccggcaacccgccgccgtcgaaccgttcacccgagccgtcgccaaacatacgcaccagacgcactgcatcatcggtgcccgggcgcaggggatcaacgacgcggagcggctgccgctggcactgctcgtcaatctgctcggcggcccttcggccaactccatgctgaacgtgctggtgcgggagaaaaacggcctttcgtacaacatcgaagcctcttacacgccttacagcgacagcggcatcgtggccatctatttcagctgcgaccacgacaacacggatcactgcatcgaactgatcgagggagagctgggacggctccgcaacacgccgctctcggcccggcggctctcgatggccaagaaacagttcatcgcccagctggcgatctcgatggagagcaacgaaggttacatgctcggtgcgggcaagagtttcctggcgcaccgcgaggtcgatacgatggaggaggtttatcgcaaaatacaggctctcacggccgaagacctgaccgccgtagcttcgtcggtcttctcctcaccatcgcggctcatctataaataacggttttcaacgacccgacacacaattatatattatggacgcactcgaacgatatattcacgatttttcgtcgccggaagaggaacttctgcacgaactcgaccgccagacgcatctgcaggtcgtacagccgcgcatgctctcggggcatatccagggtaagctgctggagctgctcgtgcggatgttacggccccgcaacatcctggaaataggcacttttacggggtattcggccctctgcatggccgccggactcgaggagggcagcgtgctcgacacggtggaggtggacgacgagctggaggagatcgccgcctcgttcttctgccgcagcccgcacgggcataagatccgacaccacgtcggttcggcgctcgacatcgctccgacactcggatgcacgttcgatctggtgttcatcgacggcgacaagcgcgaatacccggactactaccggatgctgatgggcggcggaggcggcaaagcgttggtgcacagcggatcgatattgatcgcagacaatattctctggtcgggcaaggtggtggaaccggtggcacacaacgaccgccatacgcaggcgttgctgcaattcaaccgcatggtacttcaggacgagcgggtggaaagcgtgatcgtcccgatccgcgacggactgaacctgatccgggtaaaataggacagccgtctgccgataaaggcagggcaggaaaggaaaacccgacaaacaagcgaacggccggcagacaacggaaaaaaccggctcgcaacgacgaaatttgaaaaacgaccgatatggaattgagtgaattgcaaaaacgggtggacgcatggatccgcgaatacggcgtccgctatttcagcgaactgaccaacatggccatcctgaccgaggaggtgggggagctggcccgcgtcatggcccgcaaatacggcgatcaatccttcaaagcgggagaaaaggagaacctggcggacgaaatggccgacgtactgtgggtattggtctgcctggcgaaccagacgggagtaaacctcaccgaagccctcgaagccaacttcgccaagaaaacggcccgcgacaaggagcggcaccgcaacaatcccaagctatgaaccgaaaccccgaaaagcggggataataacttatccgagaagggggttcgggagaggatgagaatcacaaacgcggacacaggctgtgaataagcgaccgtcggacgatggctggaacattgaaaaacaaaataattgcctgataggtattccgggcgattacgttcccgaatcgttccggcaggttatgtacgacggaagtcattatcgacaaaatacggcccttccgacaaaccatcttccggcaaaccgcccgataaaagcgggatcggatacgaaaagcccgtaatcccccgaacaaggggcgataccgcgataaaatacggaactgttacctgtaatcaaatactttagagttatgaaatacgatttcgatgagattattccgcgacggggtaccaactccgtcaaatgggatctggccacagacgaacgggtgctgcctatgtgggtggccgacatggatttccgcacggccccgcccgtactcgacgccctggaacgacggctccgccacggcgttttcggctatacgaaggtacccgacgcctatttcgaagccgtgaaagggtggttcggcaaacgatacggattccgcatcgaaaacgagtggatcctcccgaccacgggcgtcattcccgccctttcggtcatcctgaaggccctgaccgaaccgggcgacaaggtgatcctccagacacccgtttacaactgtttcttcgccgtgctggaacggaccggccgtcagccgctcgccaatccgctcatcaacgagaacggcgcctaccgcatggacttcgaagatctggaacgcaaggcggcggacccgcaggccaaactgatcttcctgtgcaacccccacaacccggcgggccgggcctggaccgccgaagagctgacacgcctcgggaagatctgcctgcggcacggggtaacggtcatatcggacgaaatccactgcgacctgacgctcgacggccatcgccacattccgttcgcctcgctgaacgaagagtttctgcggcattcggtcacctgcaccgccccgagcaagaccttcaacatcgccggtctgcaagcagccaacatcatcgccgccgatcccgagatacgccggaaaatcgaccggcaactcgtcgataacgaactccacgcactgaacgcctttgcggtcgaagccctgatcgcagcctacaacgaaggcggcgaatggctggacgaactgaaaaaatacctgtgggagaactacgaatacctgcgcgacttcttcacccgacacctgccggctctgccggtcactccgctcgaggccacctacctggtgtgggtggattgtcggacgttgaaacgccccacgacggaaatagcccggcagttactggaggaggagcacgtatggatcaacgaaggcgaaatgtacgccggagaaggattcctgcgcatcaacatcgcctgcccccgcaagacgctcgccgaagggttggaacgcatccggaaagtactggggtagcatataccgatcacctgtccgaccataaacgaacgcagaagagtcccgtgagggactcttctgcaaaaggaggccatgatgcaatagcaagcactgtcctcgcaaatgaataaaataccgaaatacgacactaaaaaccacaacgccccgataccgccccccggcaaggcgattccgagcataccgggttcaaaaaacttcgtgtccgcagaaagaatcaaaaccggtagcccagcgtcagggcatacgtcgtattatggtcggaaccgggttttgtcagacgcgtcagtccatactgtacttcgggaccgatgacgaaatgtccgacgatgaaatccgcaccgaagcccacccctgcatcccagcgacgaacgtcgaacccggtaccgtcgggcagagaagagtggagcagacaggcgacataaaatcccccgtgcaacgccagtcccgtacgcgccgaaagacggaatgcaacgagagcttcaacgggaagatcgaggtaggagagccgtgtggccttatccgaatcgtagttgaaaacattattcgaagtcgtggctcccttcatcgagaaaaaaagccccgagcgaagcccccaatgttctgaaaagaggtattcgacaccggctccggcacggatgcccattttgaggtgccgatcgccgaaggaagaggccgttgcaccgacgcgaaggtcggcatgaagttgtgccgaagcactgaaggcgatgaaaagcaggatgaccgcaatgatgatctttttcatattaccgattgtattaaaaatattatttttgtatcgcaaagtaagatcatacgcctttttcgggcaatactgatttatcagtaatggaggcattgcaacgcgaatacgaaaagctgctgaacgcccagcggttcgacccccgggaactggattactcggtgttggaacgccacatatcccaattgacactgctgtcgcaggtttcgaacagcggcattacggtcttcgacatgtacacccgtcgccacgccttcgcatcgtacaacttcgcggaattgttccaatacgacctggaaagtatcgccacggaagattcggactatttcaccggccgtatccaccccgacgaccggaaggaattgcaccgcaacggcattgcttgtcttcgctacctgatggaccacaaggagttggctcccgacgtaaagttgatcgatgaataccgggtggatgtcggaggacgttacgtgcgggtgatcgaacaatttcaggtattggagttcgaccggtcgggaaacatctggctttcgttgagcatattggacgtatctcccaatcagggaacggagggcggcgtacgcagccaactgctcaactatcggacgggagaagtatttccgctcccgacacccgaggcatcctccctttccggccgcgaacgggaaatactgcgcttgatcagccggggaaaattatcgaaagaaattgcggaccaactgaatatcagtgtacacacggtcaatacgcaccgacagcatatcctcgaaaaactgaatgcggataattcgatggaagcggttcgctacgcttcggcccggggtttactcgcctgatacggacaaaacgaaagcgacgggcgaccgctatcggccgggctgcagaccggaaaacatctctttgcgagccgcaccccggcagcctcctgcccggagaatcggctcggatcgacgaaaaagagccgctatctttctattattgtgcttacaaaaaaagcgtaacaactcgatttctcgaactgttacgcttttttctacaagaaagtccattaaaccttcctgcccccatattcgactgccggaatcagtgcgaccgacacggacaacgacggcagccagggaaatataaaacctattacaccaatttcagctccttcttgatccattcgatcttatcgttcagttcggcccgtaccttttcgtaatcggcaacggacggcagggcagccttcaccccgaagtagaacttgatcttgggctccgtacccgacggacggacacagacacgggtgccgtcctcggtgtaccattgaagtacgttgctcttatcctgctccagatgcgtcttctttccggtacggacatcaaacgactccaaagtctgaatgtcgttgatcttcaccacgggcgagccgagaatctctttcggaggattggcacggtaatcgaccatcatccgctggatcaattcggcaccctccttaccggtacgtacgaccgacacgaggccttcctggtaaaatccgtacttgacataaagctgcttgagccactcgtacagcgagatacccatcgtatcgcgcacccaggctgcggcctcggccgccagcgagcaggccgacacgccgtccttgtcgcggacgtagtccccggccaggtagccgaagctctcctcgccgccgccgatgtactgcatatcggtaccttcgtgcccgcgaatgatcttggcgatgtatttgaaaccggtgagacattcgtagcatttcaccttgaaatagtcggctacggcatccaccatttcggtcgtaacgatcgttttgatcacgtactggtgcccgttcaggcgtcccaactcggcccagcgagtcagttgataagtcatcagcagcaccaacgtctggttgccgttcaacagcacgtattcgccgttctcgtcgggcatcgctacgccgatacggtccgaatcgggatcggtagccagtaccagatccgccttcaccttcttcgccaggtcgatagccatcgacatcgttttacgctcctccgggttgggggattccaccgtcgggaaattaccgtcgatcaccgcctgctcgggaaccagctgcacgttggtgaagccgaaacgcttgagcgactcgggaaccagacgcacgccggcaccgtgcatgggcgaatagacgatcttcatgtcgtggaagcgtttcacgctctcgggcgaaagcgacaattcatatattttattaaggtataactcgtcgaaatccttgcccagagcacgaatattctgcgggttccggccggtaagcacctgatcgacctcggtgatcttctccacctcgtcgatgatgttcttgtcgtgcggtgccgtaacctgcgatccgtcgctccagtaggccttgtatccgttgtattctttggggttgtgcgaagccgtgatgaccacgcccgactgacatttcagctcccggatcgcaaagctcaactcgggcgtcggacgcagtgcgtcgaacaggaacacggtaaatccgttcgaggcgaagatgtcggccacgcgctcggcgaacatccgcgaattgttgcggctgtcgtgtcctacgacgacccggatttcctcgcccgcgaagttgcgcttcaggtagttcgaaagaccctgcgtcgcagcgcctaccgtatagatattcatacgattggtccccacgcccataaccccgcgaagaccgcccgtaccgaactcgaggtccttgtaaaaactctctacaagttctttcatatcgttatccatcaggtatttaacctgttttttcgtttctgcatcgtaattgccgtcgagccatttttgcgctttcgccagcacttgttgttctaatccgttttccataactacattggttttatttatagcttaaagccgttatccttcaaaaattttatacgcaaatatacacaaattatttccaatattcactatcagcaagttaaaaaacaggtgtccggaacgaccttttttccatagtaaaagtatcgacttttgcaagcattttgccgctccattttcacaaatttatttacaactttgtgctaccaaaaaacggatatacccctccatcg
